United States Patent Application Publication US 2026/0191916 A1 - sequence listing, part 52

SEQ ID NO: 222 - DNA, 395155 bp, Thomasclavelia ramosa
  source 1..395155: mol_type = genomic DNA
atattctattaaatgcaaattctgtctttatgattttataggtggcttcagctgctgcattatcatagggacatcctttagcacttaacgatctactaacattaaatgtttctagtactttatcaattatcctattcttatattcatttcctctgtctgtgtgaaatagttgaatattattcaggtttctttgtactctgctgaaggccttatatactaattttgcatctttatgtttacctgctgcatacccaataatttctcgattatataaatccagtagtaaacatatataattccaataaccacctacatttacataggtaagatcacttactactacatctaatgttttttctctatcaaattcacgatgtactatattttctactttatcattattgcatgtactcttatgtattttatattgttttactgtatagttagaaaccaggccattttcttgcataatacgacgaatttttcgaacgctaacttgatatcctgactttgataattctactttaatctttctggatcgaagtaaatcaagtgagtagtaattgttatggtactagctactcactatgcttttttataaagttatattataaaaaagatcaattaaataagaggtatccatatttcatgagaaaacaaatcaaatataatttcatataggtggcatataagattgcaatggaagaatatattgaatattataatacaaagagaacacaatcggtatatattcctaattcactttattaatttaattggaaaaatattttgaaatatttatttacaacatttccaattgtagctttgccaataagtataatacattctcttacatctgtcggaaatgtcaattcaaccgcattataatatcctttattaaaatatagattaccacaaatttattacaatgtttatttttatttacactatgaaatagtgtaaataaaaataaacacatgccattataggacaattaagtgttaaaaaagcagttttaagcataaatagtgtcaaaataggttgtaactacagttcataataaaaatatataatatactttagccataagaaagaggaggtgaaattatggcgcaatatagttctaaacatcaggttgttaaatatttagatgaaataacgaaacaatttgacaataaaaatttggatattttcactacaaagtatataagtcagacattacatctgtctagatctttagtttctatgtacttaaatgatatggtaaaaaatggcacagctataaaaattacttcaaggcctgtgtattatttaagtaaaataattttggaaaagaagtatcatgtagcattaagacaaagtgaatatatgagtatgttagaattgcgccaaatacttaaatgtaaagattctattaggatggattttgaaaatgtagtaggcaaggatggaagtttgcactatgcaatacaacaaattaaatctgcaatcgcatacccaggaggattactcatattgttagttggggaaaatggaacagggaaaaaatatctaggggaaattatttatcactattgtataaatcaagaaataataccatcaaatgcgcaatttaaataccttaaagttacaaagcaacaaaaagaaatagattatgatttgtttttgtttggaacagaaatcaacggacaaacagtagaaggaattatggatactttagatcatggaattttatacattcaaaatgtatcatatttaccagaaaatacgcaagaaaaattagcagattttttattatcaaaatccttcttacgaaaaaaaggaaagaaacgagtatataaggatattcgtattattctgagtagtatcccaagtcaaaaagaacagatgtgtgaaattttggaatcaagaattcctgtagtatgcaatattccatcattttctgaaagaaatgaagatgaaaaaaaggaacttattttacattttttctatgaggaagaggagtgtttaggtaaaaatatttcgatatctaataagctattatattcattaattagagaaacgtataacaacaatttaacagaactaaaaaaatgcgttaagtctatttgtgcaaatgcttatgttgattctgataatgagaacttggatatatatgtatttcatttacctgattatatgttatcaacagttaagatatccagtgaggaagaaaaatgtatgccgttaaaggatattaaaattgatagttcgataattcaaattatatcattgtggaataatattattcattcattcgaacaattaaatacaaattgcaaaagtgagaaagaatttttagaagaaagtaagaagattattaaacactactatgatgttattgtttttcaggaaacatacgatgactgtagagttagacaattggaaaaattcgttacaaattatttaactacagtaagaagttccacgatcattaattttcctattaattttgcttatgttctagctagattaattatttttcaacaaaatcataattctggattaaacgtttgggaaaaagagcatatcacagagataactagattatatgaatatttattgcaaataggaaatgaatcggaacagctttgtaagatgcttaataaacaaattactaataattatcgtatttctctttctatgattcaacaatcatttattttattaaatatgaagttatataacttgaacacaaaaatgttagatactatcggagttgttttgtgtcatgggtattcaacggcaagttctattgcagatgcagtaaatactttactaaacatgcaagtatttgaagcaattgatatgcccatctatagttcagtagatgatacgatagaaaaactaaatatgtttgttcaacataataggcatttcaaaaatattatcttaatggttgatatgggttctttagaagaaataggaaaagaaatcgagggttttgcaaatgttggcattattaataatatttccacgctattggccttagaaattggaaataagattaaacaaaaaaagaaagtacaaacaatattggaagaagtaagtaaacaagccaaagtatattatcatatgatttctattgcaaaaaaagataaagcaattttgtttactagtgatgctggaatatctattgcagagaaactatgccgattatttaaagatagtttaccaaaaacaatagcggttgaaatgattgcttatgactacgaattattattacaaaatggtaaaaaggatactatttttgttcaatataatgttgaactattagtaaaaccaatgaacttacaattagatggtgttagaaatgtgacgttagaagaaattattaactttgagaatattaatatggtaaatgagattttagcagaatatttaagtactaaagaaattgaacaatttgatcagttattacttaaaaatttctcattgcaatctattatggaaaatctaacaatattaaatgctcaaaagttactagattatgtttatgaggcaactaacgctttgcagcatcgattaaaacgcaaatttctaagcaagacaattgtgggaatcaatatgcacatttgttttttaattgaacgtttggtaacgaaaaaaacagtagaagaatattatgatattcctggatttataaattctaatagtgaatttattgaggtggtaaatgaatgttttgcgtctattttagaacattataaagttactttaccaattaatgagattgcctatttgtacgaatacattaagaatgatatcagtgtaaaggtaggatcggatgaattttaatagtagggataaaggaggaatttatgagaagaataattttagcttcacatggaatgttagcagaaggtatgaaagatagtgttacttttatagtaggacatagtaataacatttatactatatcagcatatacaaaagaagatttttcatttgaagcagaagttaaacaaatatttgaaagttttaatgatggagatgaagtaattgtcatcactgatatatatggtggtagtgttaataatagttttattagactattaaatacgtatgtatttcatttgattgcaggaatgaatatgtcattaattttacaaattatcaatgaaaatagaagtattgaagaacaaatacatgcgttattagaagaaaataaacaaatgatatgttattgcaatgatattgtaaaaaaatcatatcaaaatgatgaattttaaagagaggaggaagattatatgattttaatgttgcgtgtagaccatcgcttgttgcatgggcagattgcttatagttggactaactatttaaacgctaactgcatattgattgctaatgatggaattatgaaggatgaacttaagaagacagctatttatatggcaaaaccaccttcaacaaagctggtcatgaaagatatagaaaattctataaaggctattaacagtggtgttacgaatcaataccgactattaataattgttgaaactgtagaagatgcatatagattattagaaggatgtgaaaatatccgaaagattaatttagggaattccaaggtaaaagatggaggaaaacaattagctaaaaccttttatgtattgcctgaagaagaaaaacaattacaacagatgttaggtaggggagtagaaatatttatacagcgtgtgccagaagttaaggctataccatatttaaaatgagagagaggagaataaaatgattggaacagcaataattcttggactagtaacagcggctcttgtagttattgagtatgctggaggtagaaattttattacacaaccaataatggccggaactgtagttggtttgttaatgggagatttacaaactggaattgtgataggagcaacattggaattagcatttttaggggctacttctattggggcagttattccacctgatgctatgataggtactattttgggaactgcatttgttattaatgctggagcaagtgcagagagtgcgatggttttagcattaccggttgcttcattagctttaatttttaaaaattttcattatgggtacattgtttctttatttcaaagacgtgccgataaacttgcagagcaaggtgattacagaggcatagagatattgcattggacttgcggattaacgatggcagcaattttaggagttttagtaactgtctcatttgcagctggcagtgatgttatgagtgatatattgaatgctattcctgattttgtacaaacaggattaaatgtagctattggtttattgccagcaattggatttagtatgttagctagaactatgttatctaaatcaaatatttatattttcatttgtggatttgcagttgttgcgtattcacaactaccaattttaggggtagctatttttggaacagtattggctattattcttattaaacaggaaattaataaaacagaaacagctgcgataacagaaggaggaataaatgatgacttctaaactaacgaaaaaggaattaaataaaacaatgttgagatcttgtggttgctctttttcatggggatatgaaagacaaggaaatattgcctttgcatatgcaatgattcctgtattacgtaagctgtttccacaaaaagaagaagcatctaaagcattaaaaagacatcttgaatattataatgtaactaatcaatgtatgacgtttaacttaggaattgcttctgcgatggaggaagaaatcgctaaaaataaagaatttgataccaaagtagtgaatgaaacaaaagtagcattaatgggaccgatatctggagttggtgatgccttcttttgggggactttcaagattattgcaacggctgtagggaccacctttgccctacaaggaaatatattaggaccgattctcttcttcttaatttataatattccagcttttgcaattcgtattggattaatgaatgtaggatattctttaggaactaaatttttaacagaaatgcaatcaaatggattgatgagcgttttattaaagggagctactgtacttggactatttgtagtaggaggaatgtgtgcgagtttagtaaatctcaatattgtgtatacgttcagcgatggtgctaatagccaaacagtatctgatttattaaatcaaattatgccatgcttagcttcactgttagtattcgcaactacttattggggaattgttattaaaaagataaaacctattactatgattgtattaatgacaattattggtattggtggcgcatatttaggaattttaggttaaaaagaaggttgtaaggagaaaagtaactatgttaacaatggaacaatgtattcgtgaaacacccataagaatgatggaaatagtagaaaatcaccagaacttatttaaagaagttgtaaaaaatagatatcaaaaaattataattactggttctggttctagttatcatgctggagtggcagcgaaagaatgtatgttaaagtatatgcaaataccagtagaagtcttatatccctttgaaatagaatcttatatttttcaaaattctcaaactacattagtaataggaatatcgcaaagtggaacaagtttaagtacatatcgtgctatgaaaagggcaaagaaacacggatgccatatagcatctatgtcgggtagagatgataatgcagtagtattaaatgaagttgcagattatatactgacagttaaatgtggagaagaaggggatttacaacccaaaacaaaaggtatgttatgtacgattgctaacttaatgttactaggagtgtattgggcaaaaacatatggaattattgatcgaacagcatataaaaaattcttacaaagctataagaatgtaagtaataatctcataagcatcgttgatgatgcagagcagtggattcaaaaaaatggaaagacattggtaaaggcaaaagatattcgtgtagttggaaccaaagatgtatttggcattacattagaaggaagtttaaaattagtagaaactttaagagtgccagtatctggttatgaatttgaagagtttacacatggaatttataatgctatcaatgattcttcttatttatttttattagatactaatgtagaaccaagggtggagacattaaaaacagtattatcgcaatggacaaataatattgttattattggaacaaaattaactgataaaaaagatttttatgtaaatagtttgaaaaagaaagactttgtatcttttgaatatataatattgttatttatgatatgtgaaaaagtatcggcattaaaaggtattgatatacaaacaactaaagatgctagctttcatgccaaattaggtagcaaaattttaagagatgaataactattaatatttcctccctgaaatattaaagtataatttatatcattaataaagtaaaaataactaaaaaaacttgtttcattataattaatgaaataagtttttttgctatataaaaagaaagatattttaattgaaagaaaaaggcttaatactagagaggaaagtgaggacaattttcatgagaacagtctgtattcaacaggtatcttataacccggtatgggtgcgggaaaagaaaaaaatacaatcttttggaataatcattaaaaaagctgattatattttagcaattttaaaaggtatgaaaatgctatataaatttattgatatatagttcttttgctctttgatattagttatgtctttgtgttaaataagagtatgttaatgtaaatgctttaatatagtaccaagaataactggaaaaacaattattcctaaaaaatattctaatggattaatctcgcttatttttttatcatagaatagtaggcatttaccaataaatacactcagcataaagaatgaataatttatcaaaagggttaaatcaattcctaaacatataaatgtgatgaaaaaatatagagcttttttgaattttttattatctataaacatattaaattatcaactggcttttagtattcaactgaatatggttttgatgaagaccaccagccaccatattttccagatgatcctgagaagctttttccagctactttaatagttgctctataattagcgtatctgtatccagttacagggacattcccaccatttaaataaattaaacctctggttctttgtaaatcatatttaaaagtaatattcagaattttagagactccgtaaccacctattgctcctattaaaccatcaaaaactatatcaacaaccgaagtccagtgttttgacaatacagttttacctaactttgctagtagactagatgctgtcacgccaaaatgtgctaatgcaatggaagtagctattgccgctgttgcttcaatcaaaggagcgaaatctatagacatttctgttacaacgtttacaggagttgaatctatattagcataagtagatatagtaggtaatgttggttctgcttgagtaccttcattatatttatatataacttcgttttcatttaaataaacttttcctgtatttttatctacatacgaatatatctcttcaccatcgtcgaaatatgctgtgaaaataattttagaatatgtttcagtcattgtaatttcaggagtctctccattattgaagtcatattttcctaagcacaccgtactagaagctgataatggtgtgatcaaaaacgtagatgttaaaataaaacttagagaaataattaataattttttcaatttcatatatgtcaccatccttaaatttgtagatatttttatagcattatctctcactaatattgtattctacttatttattattttccatttatatgataaaaaacattggattaatcaaactttttttgcgttgactgaattttttctttgctgctatgttgttgaatatgaaatgttaagaaatatataaataaaatttccttattacattgaaaagcttgttttaatatgctaaaaaatacattcatttaacctctggaaaaataaaggaatatttgttttaacgcctaaagaaatagatgctttatatgatgtaataagtgatgtatgtaaatgatgcaatactggacaaggaaataggtggaagattaacaatattttggttagtaaaggtattatttcgtattaaaatattagaaagagaatataaaaaaaggataaaatcataaaaaagaggcagtttgcctctttttttgtgagaaatatagtaaaaaaaattgtgccttttttgtaaaacagatatgctatgctttttatatatttattataaattaaattataaaattacaaaaaggagacatgttcatgatttcaaaaaagaaagcaaattatacaatgacaaaaggatttagtattttatgcaaagcgctaattatatatatactgttttactttataattggagcagttttaattagtgttgtaccagatgatttatcagtatatcttcgattgacagtcacatgtataacttttataggaatgatttttatttcaaaagattattttaaaaataagtttgtgaatgattctatggatgttatggataacagtttaaaactagcaattatttcattcgctcttgtaatggttaatagttttctaacttatattaatgaatcaatgataactgcatcaacatacaataatgatttaattaaaaatatatatacagacagccctgttatcctaggtattataagtattgcacttttgccatttattgaagaaatattttttaaatacgtgctttttaaaaataccgattctttaaaaaaacactggattattaagactttgagcatagggttgctatttgcttctgtacattgtgcaagcgaagttattaagcttgatataatagcatttatctgtatgtttaattatttcattttctatgttgctactaatattatttatcataaaaaagaaaatctgatgatggtagtaataatacacatgctgataaatatatgcgctgttgttttaatgtaaagtaaaagagttgactggtgatagaaaagcggaagagtttttacttaaattcaaaaatattgtaataaaaagaggtgacggaaatgagtgttgcaggaaataaaaaaagagtatttattacattggatctaaatattttggaacagcttgaatttctggctgaaaaaaaaggagttaataaaagctctttgatatctttctggatcagtgatgaatatgaacgtgtaaaaaattctgaaaaaaaagacgaaaaaaataaacaatttatattattcttattatgattgtgatagaataatggcaaagaaaaaaacaaaaaaaaagaataccttatttgtccagctaggtattcttaatacgataatttccagtcgaaatggaaactaaatgttgatttcaaatagaaatcagattagtatgttatttttataacattatatatattaataaataaattacttaatttatttgctaatattataacatattaatttgtttaatcaatagtcgaatattaagataagccaaatggaaaggtatccgtttggtttttgttttactatattttgcaaagtgcagttttactttatttgacaaagtgcgtttttactatattttgcaaagtgctgttttactatgtgcagttttactatatttagcaaagtgcgaaatgtttcgactaaaaatataaatggggcggtcgatgggaatcgaacccacgaatgccagagccacaatctggtgtgttaaccacttcaccacgaccgccatatttactttgttaagaggttattaactctcaacgcaagaatgattatatataaaaatttgataaatgtaaagagaaaatgtaaaaaaaaataaaaaaactcaaagtttaaattctttgagtttttattctaataattctgagatatctgtttcaaagttattggaattttcacgactgaaatatgttgtataactctcgcttttttcatcattatcaataattgtcataacaaattcacactcatagcacaattccatgattgtttgcatcccttgataagttatactataagtctgataattatcattttcagtattaatttctaatttagcacgacttggataaatatcccagtcgattagatttccatcaactccccaatctattagaataaaagaaataggatcaataattgaatcgtcaaatttgtcacttgccttaatggtaatatataatttactaaacataatcacccctccattcaatagtatactaaattaattatcaataaatgtgtgaactatgtggaatatttaagataatatcatatctttcaaacatccaaaaaattctcttaaataatagtgtggagcagtatctaaattttctctagctgcatatgtatgagcttctaaaccgtgtttatttgctaatagtttacttcggtagcaatgaaaaccattagttattataactacttcatagtcttcagtaggcgatgtttcaataatttttttactatagataatattttcatttgtattagtacttttattttcttcgataatcaatgattcatctattcctttgttgattaaatagtctttcatagcttttgcttctgtgatgttctcgccgtggccttgtcctccgcttacaataattgggacatcaggaaatttttgatgatattcaacagctgcatctaatcgataacgtaatagtggtgcaggtttgtcgccgtataaacgagcaccaagaacaatgaggaaatcactgcgtttgttatacttattattaacctcatgtataattaaaccctcgataattataaatacaattacactaataataataattcctttaattgaataattaagaattttaggtaatgaggatagaatactttttctaaaatgtaactcatatacagcataacacattaataatgctgtaaaaatcggataaagtatataggcattgataaaccgagaattagtgacaactataatgaagtagaataatgatagcaaggcaagaaatagtagtatatagtcaaataatttacaattcttttccattataaaataaactccttttttatatcataacatacaagaagaaatatttttcttaaaaatatttaaatatggtaaaaaaaatggtgaaatagtataatgaaagtatgttgtaggatattaggaggactttaaatgaaaacaaaaaagtttgacaatttagggattgaaccatcattattggggtttggctgtatgcgttttccattagatgaggatgggaaaattaatgaaaaagaagcagaaaaaatgattgataaggcaattggatcaggggttacatacattgatactgcttttccttatcataatggcgatagcgaaccgtttgttggtaaagtgttaaaaaagtataaacgtgaagatttctttttagcgacaaaattaccaatttggaatgtttcgagtaaagaagaggcaaaaaaagtttttgaagatcaattaaaaagattagatgttgaatatgttgatttttatttattacatgctttagatgctgataaatggagaaaagtattagaatatgacttgattggaatgtgtgaagaatttagagaagaagggaaaatccgtaatattggatttagtttccatgatgaatatccggtttttaaagaaattcttgaatatcatgattgggatttttgtcaattacaattaaattatatggatatggatattcaagcagggatgaagggctatttattggcagaaaaatataatataccaattatagttatggaaccgatcaaaggtggttcgttagcaaatttaccagaagatatcgaaaataaatttaaagcatataatcctgatttaagtatttcatcatgggcacttcgctatgttgccagtttgcccaatgtgaaagtagtgcttagcgggatgtcaacttatgaacaggtactagataatttagctacttttaaaaattttgagtatttgaaagctgaagaagttgctttgattcaagatgttcgtgatacattaaaagcaagaactcaaaatggttgtacaggatgtgcatattgcatgccgtgtccatttggagtggatattccaaataattttaaatattggaataatgcttttgtatatgatagtcatgatcaatttaaagcaaagttagaaaaaatggtttcagaagctaaagctgaaaattgtaaacaatgtggagcatgtgaaaagatgtgtccacaacaactgccgatacgagaagatttaaaacgggtatgtgaatatatgaaaaaataattatggtattaagtgaacctgattatttagactaaaagtaaatataaatactacttagatgttaattattttaatttgtaggttgaacaataaaaaaggagattttaacttaattagagtaaaatctcttttttattgtttagtgggtgtattcaattgtttcttttgaaagtaaccagttgaaaaaataattattactccaattattgtaattaaacatgcaaatataaacatcatatttaaaccatattgatcttgtaaaataccgccaaaaagatttcctatagtagatcctaccccagaagtcataatccctatcattgtttgacccatcatttgatcatgacttttgaggttatatgttacatagtaagttatcactgctgttagtaatccatacgataaactttgcatcatcattccaatgaataaaacagggagactaggtgctagacaaatagtaaaatttcgaataatatagaaaaaagctgcaaccataattaaagtgatactgtcatatcttctaattaaccttggagtaattgccataacaggcatttcgctagctgccatgaagaagattgcaacaccgtacaatgaagtattaccgccaagatttttaacgacattgattaaataagttgatagcgaagttgcagcagcaaacataaaggagaagcctaagagaatgaaaaagaagactttataatttttaataattgtaaaaatattcccctcttttttatgggttgcctgtttaacattggtatttggcaaagaatataaaattactaaatctaaaattgcagaaatgacgaagacatatgctaaaatagtcgggttaaaaaattcaatgaactgacccaagagcacagcactaacagcataagatatagaacccattcctcttgctaagccaaaatttatttcttttccgtcttgaatatagttcattgcaatcattgataaaaaaggaactgttgaaacaattaatgacatcattgaaacatataaaagcatgattagaataactgataaatcaactaaagctaaagttaaaaaagctccagcaataatcaaataaataatagataatagctgcttaattgttaggccttttatttttgaaattaaagatgtgacaaacggagataaaaaaatcgttaaaatacacccgcttccagaaacaatgccgatttcagtgttgctcattcctttatattgaagaaatacggcaacatatccgtaaatgcaacaagttgccatccaatataaaatatgcaataaattatatttcatttgtagttttttcatttttcttgtcctcatactctccatgaaaaacaaaatagctctcgagatgatactcaaagctattcgttatttagttgtaaatccatcatattttaagattaatatagcaatttttatttcttcgagcaagaaaaatagaggtttttcaaagattgaaaaaataaataaagatattgattttttaagaaccaatatctttattataaaattagtaatacttatattttaatagtgtgaattatgattgatcaatggctttaacaacacgacagggattaccaaaagctaatacatttggtggtatatctttggtaacgacactaccagcgccaattactgaaccatgccctatttttacccctggtaaaacaacgacattacctccaagccatgtgttatcaccaatttcaattggcattgctttttctaaaccttggtttcgacgtttataatcaagcgggtgaatagctgtatacaggccaacagaaggtccgatatatacgttactaccaatattgatcttggctccatccataaaataagcattggaattaataaatacattatgaccaaaggtgattaaattaccacaatcacaaaagaaaggtgagatgatttcaagattgctattctcattttggaatagttcatttaaaattttttgtcgaatatcctggtctagtgggtcggtatgattatatttaaaacaaaggtgatgggtattcagacgatctgttaaaactttttgatcgttattagcatcataccacatccctaataaagctttttctctttcggtaatgttagaaacattaaaaaggtctaataatgtttttaaaacgccataatgattatttgaagggataatcttataggcaatatttttaatactttgattggcattttccattacaaaactatattttgctttttttagcatttctaggtcatttggactatccccaaatacagcacattcctctaatgataggttatagcgcttacataatagctcaagtgcagtacctttattatatcgtggatcaattaagtcaatactttgatgaccactggaaactggtttaatgatatttccgatatcatcagttagcctatttaaaatatttttagaatcttcagctggaacaaataaagcaaattttacaatcgtgtcattaatttcatctaacgattcaatcatttcaagtcggtgatagtatttagaatatacattataaaattcatttgacgcattcaataaataagctgatttaattccgcataaacatatttgaatacgagaatcctcttgtaattttttagttattgtataaatatcttgtttattgatttcacagtgaaaaatttcttttttattttcaatgatatatgcaccattttcactaatgtaagtaatttcatcttgataatcatcaaaaaaagattttaattgataatattgattgccactggcaactacaaaataaatatcattttctttaaaataattataaatttttctaaaaattgtgcggttataatgcatttggtcatctaaaaaagtaccatccatatcaactgcaactagtttaatcataatttcacactccttgaaaatagtctaacataaatcagtaaatgatgaattctatttttaatacgtgaaaaaattaatgtgagttcaaataaaatgtttttagatgcaataacactagaacgataaatttataatttgatcacactgttggtattcgcttggtttatgggaaatcattaaaattgtgtgtgtcttctttaatttaattaatgtttgaaaaatttcatatgaagtcttttcatcaagagcactagttatttcatcaaataataaaattttagaattttttagaagtgctcgagcaattgctagcctttgttgttgtcctccagaaaaatttaaagcaccgtcacttaaaatagtatcgtattgttttggtagtgacataatatattcgtcgatttctgcctgttgacaagcttttttgatattattgatatcaggatcaataagtgcaaggttttcataaattgacatattgaacaagtacggatgttgggcaacacaagttaaaatctgtgaatattttatcctagaatacttgtctattggatgtgtaccaatcaatatcttaccactagttggtttttcaaagcgcaaaagtaaattgaataaagtactttttccacaaccactgggaccgattattgcaattaatgaatttgactttaggcttaaattgaagttttgaaagactgttttttcacgataagaaaaagtaacatttttaaatgtaatacaaaattcatttggtttgatcatatcatcattaagaaaatattcattacacgatgaattaataaaattatcataacgatcaattgatacattttttattctgagttcacctaaggtagaaataaagtcacttaaagagctgaataaagttccaaaataagactggataatgagtactgtgtcaatttcaaacttgccatttagacaattatagcaggcatagaacattagaataatttctgtacacattgtgatactaggactaattatgttactgattattttattgttaatttgtttatcgtgaatgtttagataagctttgttcaacaattgatatttggcatgtaactgatcaagaatactgaaaattttgatatctcgtaaaccgttaagcagttgactgtaaaattgcatttcatcatcagctttcaattttccttctttggttagaatttcaaatttatcattatatatgtttaaaatatagataacgatactattgatgatacatcctaaaatcattaagctgatactaatttgactaagaataataattgaaataataaaagatagaaatagcaagatagcttgagatagccaagtaccaaactctgcgagtaatttaatatcaccattaacgatattaagaatttctcctttgctgtgattagtaaagtatttcatattaataatatctaattttttaatcatatcattttgtaactttaggtagacatcattatatagctttttttcaatattatagctgataattttaaataactttgatgctattttaagaacaaaatacaagatcatggtaattatgaccattttactattttgtttagttaaataattaatcgttaagctaaacaataaacttgtaaacatataaggaccatttgctaataaagaagctaagaccagtataaaggttatttttttattagctttagtaacttgaaaatattttttaataattcttagatttttcattttagaaatttgtttatagcattttttaaaagagtttggatttcttcctcttttaaagccatgttaccaccatatatttgagttgcaattccatgggtataaaaacgaatatcacgataaagtatctcactttctttaattgtaataccaaattgttgtgctgaatattcaatcgtttcacgattccaagcggaatggacgacttcttcaatggaacgagttttgataaattcattgacaaacaatgctccaaatagattcttgtctttgatggcaaaatcaatataagcaaaagacatcgtgtaaagataattatttttatcaagatgtgctaagatgaaatcgttgtaatatgcatcaatttttttctttaattcaaattttaattcattcatatcattaaaaaccttaaagatgggcattgttgaacagtttagttgtttagcgagatagcgtgcatttagattttcaatcccctcggatttagtaatttcaaatgacttttcaataattaactcttttgttattcttgtttttggtggcataattgactcctttcatataaaataacatatgttatataacgattgttattttatataagaacatgtactttgtcaatatacaagggataaatgtttaataaacatattttacatatactgctcttttttatctaatcatactataatttatttgagttactttaggtcaagtgtttttattaattatttttttaattgttttaaaataatacaagcagccttattaataaaattatatattatataatagttgtatatatttaaaaaaaggcatgataagtggtgaatatggttacaatagatacgctaataatatagatagaatgttagattgtaaattacttgagaaaaaggtgatatttttataaacaaatggtttgtgatataatatgtgcaagaattggagagtgataatgatgaaaatagtagcatttactggtgcagggataagtaaacaaagtaatattccaacctttatggaaagaccagatgttagagaaaagttatttagaaattatgctaataaccatcatgaagaatataatgaagtaatcaaacaattaaaagctaacatgaatggggctgagcctaacgatgcccatattgcattagctgaatatgatattcctattattacaatgaatatcgatggtctacataaacaggctgggagcgatgccttagaattgcatggcggattgccggaagaagatgaattgagtatagcctggtcattatttaataaaccagtattatatggtgatccggcacctaattatcaaaaggcctatgagatggtaggggcattaaaaaagaatgatatatttattgttattggctgttcgtatcatacggcgatagcttgtgatttaagagaagtggcgaaatcaagaggggctaagattattgaaattcaagaagatgctgctcataatgttagaaaagtgttaaaaggactattaaaataattatattaattgacattttgattatttatcggtattataagttcatataataaatacgatgaattgaaagagtaaactaggcgtttaggcaaagagagtatcgggttggtgtgacgatatccaaataaatagttgaatacatcaaggagtagaatgttgaagtaagtaggcatctccggtgacacccgttaatgtgtaagagtatgaactatagttgtatagcgtacttgatgaggctgatagagtgatctattagtgaataaaggtggtaccacgaagatatctcgtcctttgattaggatgagttttttatttataggaggaaattaaaatgattattgtcttgaaaccacatactagtgatgaaagtattaaaaaaattgaagatgtgattagagctaggggggctgaaccacatgtttctaaaggagaaatccaaacaattattggaatggttggagatacaactcaaattgatcctaaagcaatcgaagtagaaccatgtgttgagaaggtcatgaaagtatctgagccatataaacttgctaaccgggcttttcatcctgatgatacgatcgttgatgttgctggtgttaaagttgggggtgacaaccttgctttgattgctggtccatgttctgttgaaagtgaagaacaagtaatcgagattgctaaagctgccaaagctgccggtgctaatattttaagaggaggcgctttcaaaccaagaacttcaccgtatgcattccagggaatggggtcttctggtctggatattcttgttgcagctaaagaagcaactggattgccaatctgttcggaactgatggatgcccagtatttagaagaattcaatgagaaagtagatctaattcagatcggggcaagaaatatgcaaaacttcgatctgttaaagaaagtgggagcaggaacaaagaaaccaatcttattaaagagaggattaagtgcgacatttgaagaatggatcatgtcagcggaatatatcatggcaaacgggaatccgaatgtaattttatgtgaacgaggggtaagaacatttgagacatatacaagaaacacgttggatttacaggctataccggtagtaaagaaattaacacatttaccaattataattgatccaagccatgcaggagggaaatggtggttagtggaaccaatggcaaaagcagcagtagcagcaggagcagatgggttaatgatcgaagtgcacaacaatccggagaaggcactgtgtgatggaccacagtcattaagaccggaaagatatgaagaattattaaaacaaatttctaaaatagctgaagttgttggaaagaaaatgtaaattattttaaataatggatatttttccttatttttcttgcaattaccaagaattatatatataataggaacgtaatttagagttaaaggggggaatagttcgatggcaaaaactgtagtaagagaaaatgaatctttagatgacgctttacgtcgttttaaaagacaagtttctagaacaggaacccttgcagaagctcgtaagagagagttctacgtaaaaccaggtttaaaaagaaaattaaaatctgaagcagcaagaaagaacaacaaaggtaaaagataaaaaatggggctaatgcccttttttattttaattcatgaaagttattaaattataaaaaagttaatattgtgtcttttactaagaaaagataaaaacagactttaaataaatctgtctttaagaatcaatcagtatcatagtatgtataaattacttttttattagaaaggttaatcatattaaaaaataaacaagccatcatcttgtttattttttttcacaatgaaaatgtccgaaataccaatgcttatggcttacttgattttcaatcaactgtaaaaattctgtcaaatcaagctcaccgcgtatagggggcaggttcatataatagacagtgcttttaggacacgtatgagttaaaatataatcgattttaaaattatgtgccttaagatttaataatacttcttgattgtttggtaattcggtttcccaccaattatatcctttgactcccatctgccaagttggtgaaaatgcttttccgaaagcaaaaaatgtatgttttttattgtaaggatttgtctatgcatcaaatgaataatatttgatcttaaaaaatggacttttccgccattctatattgtaatgggtaattgatttagatagtcgaagtttttgtgatttccatcaataaaacagatttgataggggagtgctgctaatttatttaaaaaatccagctctttttgattgttgtgaaacacaaagccgaaatctccaataataaaatatcacgtttagttaaatagtgattaaacacattaaaacaaccttgatggtcgagggtatctgcggtaatataaatcgttttttctccttaaaaaatctattgctttgattaaaaattgcataataaacacattgataattttattaagcaagattaaatcatgagtatttgacgattaactaataatgtaaaaaatgcaaaattaatttcttcaaaatctatactagtatcactatcattttttatcattacatataagtttaagctacttttgttaataggtatgttatatgcatctctaaaatgattttagtataaaaattattatagtgaaactattttattacacaattaaacgcatttactaaaaaaatattcatataattagttaggtgattcgatgatctatatggaaaataagtgtttaagtgtcaaatattatgaatgtgtgatgcttttagaaaataatgttattgagataaagatggctaataatactcttaaagtaactggcgcagatttagaaataagatattatagtgatcaagaagtaataatttatggaaagattgattgcttaagatttctatgagattaggatatgatttatgtgaagtcgtcagtgaggatatagtagggttattgaaatcatttaaagagaaccatattacagtatttcaattaacaaaagtcgatgattgtacatatcgattctatttgcctatttatcaacggataatggttcgtaaatatcatttaacaattatcaaaagtgttggaatactgtattatttaattttaatattttatcgtaaattgagcatcgttggagttgtcagttttgcagtcactgtgattttatgtaatcaatttatttttagagttgagattatcggtaataatcctagtacaactaaattagttaatcaggttttagctgaaaatcatattgatgttggtgataaaaaaagaacttatcaacaattaaatgatatttatgatgatttaaaagatagttttaaagggaagatagattatttaaatatttatcaagaaggtggcgtattatttgtaaaatatacaaatagtgttggagctaaaaaagtagaaaagaattttgagaatatttatgcaagtaaagacggagtaattcaaaaaattgatgttagcagtggaaatattttggttaagttgaaccagtatgtaaaaaaaggtgatctgctagtttctaatacgattacttcgactagtgaagtagataaaattattgaaaccgaaggaacgatcaaagcatatacgtatactacctatgaggcgaagatcgataagaaaaaaatggatgatggtgaagcatttagctatcttctccatacaattcgtagtaaactaggttcaatcgataaaatagatagagaaaaagttttatcttatggtataattgataacaaaagagtattaaaggtacaatatattttgatagaagatattgcatctaaagaggagaattaaatgacagaacaagttaaattagaagaatatagtattgcgcaattaaataatatttgtggaaatcatgacgagaattttaaaatgattgaagaagccttaaatgtgagtatttctcttagaggtgatgaactcagcattacaggtgatgatccagaacattttaaagaagcaaaaaaagtagttgctgcacttttaggattagtcgcaaaaggaattacgattacacgccgtgatgttgtttatgcattgaaattaacaaaagaagataatttaggaaaaattagtgaattatacaatattaggattactaaaacagcgagtggtaagatgatttatcctaaaacaatgggacaaaaagattattactttgctcttaaaaataatgatgttgtttttggagttggaccggcaggaacaggtaaaacttatttagcagtagtatttgcggttgacgcactgaaaaataatattgttaaaaagatagttttaacaagaccagcagttgaagcgggagaaaatttaggtttcttgcctggcgatttaaaagaaaaagttgatccatatcttcgtcctctatacgatgctctgcatgatatgctgggtgttgaacaaactgaacgtttgattgaaaaaggggttattgaaattgctcctctagcatatatgcgtggaaggactctagaagatgcatacgtgattctagacgaagcacaaaacactactgataaccaaatgaagatgtttttaacacgtttaggttttaattcaaagatgattattacaggtgatattacacaaattgatttacctcgtggagttgaatccggattaataaaagcactaaaaatcctaaagggagttaaaggcatttcatttattcatttaactgctatggatgttgttcgtcatccagttgttcaaagaattatagaaaggtatgaagggaaagatgaataagttattaattatcgaggacgatgtttcgataaacaagatcctttgccatgaattaactaataaagactatcaggtagatagtctttatgatggaaaagatgcttgtaagcagattttatcaaatgagtatgatttagtacttgttgattggatgctgccatataaagatggagttcaaataattcaagaatgtcgtaataacggatatattaagccgatgattttattaactgctcgcagtgaacaagaagatattataaagggcttagaatcaggggctgatgattatttaatgaaaccttttcaagctaatattttgattgctcgaattgaagctcatttaagacggtatcataaacattttaaaggaattattaaatatttagatataaaaatggatttaagtaagcatgaagtatttgttggtgatgaactgattaatcttactaaagtagaatatgacttgttacaaatgtttattgataataaagaagaggttttatcacgtcaagagctcttgatgaagatttggaattttaattatgatggtgatactcgtttagtggatattcatgtatttaaattaaaaacaaaattaaaagatagtcaggcttgtttccagtcagtgcgtggcgttggatacaagttggtgagcaaagatgaataagaattatcaaaaggttattttttcagcaatcattgtaattattttaatgatttggaattttaattatagttatatttatttgattggatttatgattgcgatgttatttatcgtttatgatacaaatcgttattatcaacagcaaattaatttttataaacgtgaaaaagaaaatgaaattcgtgaagttgaaggagaaaaagattttaatcataaaatcttaaattctctaatcaaaacaatgaatttaccgatgatttttgttaataaagaaggaacgattatcttcactaatcagagtttccgtgatgcttttaaaatcaaacatttgcgaggtaaatattataaagatatttttacagatcagttattaaatattgttgatcaaagttatatttttgaaagaaagttttcaactgcagtttgtattgatgaacgttattatcaaattgaaacaacacctgtatttcgtgatgatgtagcattcgatggaagtattattctttttactgatgttacacaggtaaaagagatcgaaaagatgcaaaaacagtttttttcagatatttctcatgaattaaaaacaccaatgagtgcaattattggtagcgtagaaattcttcaaaaagaaggaataaaaaataaagatacttttaacgaatttatgggtatactactaaaggaaagttatcggatgcagaatattattggagatattttagaattatctcgattagaacagcctcaagcgactctaagtcctgcactggtagatattgattcactgatcaaagatacagtggaattatttgagcctttagcaaaagataaacaattgtcattagtatatcaaacaaaaatcaaagaagaattgatgttagattatacgaccgttaaaacgattttaaataacctggtttctaatgctattaaatattctaatgctggggttatttcaattaaatgtaattataaagatgataatttaataattgttgttcaggatgaaggggtaggcatttctaaagataatatcccgtttatctttgatcgcttttttcaagtggaccgttctagaagtaagaaacttgggaccggtttaggattgagtattgttaaaaaaatggtggaattaaataatgggaccattgatgtagaaagcactcctggaattgggactactttcacggtaactttgccaattttgtagaaaatataatttcttttacaagtaacacaatttttcacacaatataaaaataatttgaacaaattatttatttaagatatgtgtgtaaagtaaaaggagtggtataaatggaagagagaaatccaatggaagaacaagtagaaaaagaagaaaatagtaaccaacctgaatcaagaatgggaaaacataataaaagaaaagtgactgtaaatacaaatggtttatttaagatagttattactcttttagtggttgcctctttaggaatgaatgttttcttatttacaaaagttaataagagctcgtcaagtggttcttcatcgaataagaatgcaactgtggaaaatgtaaattatgatgtgaagagctctacaactgatgtgattgaaaaagtgaatagtagtgttgttggagtattagtctatgctaatggaactgctagtggtagcggtagtggagttgtttatcgtgttgatggaaaaacagcatatattattacgaatgcccatgtagtaagtggagctactgatgtgcaagtagtattttcaaataaagaatctgtaaatgcaacgattgttggtagtgatacttacagtgacattgcagtactaaaattaactgctgattttgatatgaccgctattaaatgtggagattctagtttattggatcagggagaaactgtattagcgattggtagtccgcttggaattgaatacgcagggacagttactcaaggaattgtaagtggaattgatcgtactgtttcagtggatttaaatgatgatggtcaagaagattgggatatgaatgttattcaaactgatgcagcaatcaaccctggtaacagtggtggtgctttggtaaatatggctggtgaattagtcgggattacttcaatgaaattatctaatacttcagtagaaggaatgggatttgctttaccaatcaatgatgttattacttcagttgaacaaattattgaaaatggtaaagtgacacgtccacaaattggtatctcaggagtatctttatcagggtattcaagctatcaattacgctattatcgcattaatactgatttgacagatggtatttatgtatctcgagttacttctggaggagcagctagtaaggcgggtattcaagaaggagatattattgttaagtttgacggtaaagaagtaactacttataagagtttcttaactgaattatattcaaaagaacctggggataaagtttctgttgtggttaaccgtaatggtactgaaaaaacaatagaagtgacattgggtgaacagtaagaataactgacaccagctaataaagagctggtgttttttatttgtggaaaatggagatttataatataatgtaattataagttataattagggaaaggtaacttaaaaatgaaatgagggaaaattatgaaatgtaaaaaatgtggtcaggaattagaaataggggtgaaattttgtcctaattgcggtgaggattgtgtaagtcaggatactggaataccggtaaaagagtctgttgataaaaccaaaggtgcaattaatgattttggggaaaatatgcagaaaaaagaagttgaaatttcagggaaaaaattcaacatgctcgaggtacttacgtttgggtcgggtatcttggcaataatttcatgctttttaccatttgcttcagtatcgatttttggatatagtcaaagtgttagtttaatggatggtggagatggtattatttgcattgctttagttgttgttgcattgattttatcctatcttcataaagacattgtagcgttaggcttagctggtgcaactgcagttttggcggtatatgaaatttttaatgctaaatcagtactgggtggttatgggaatatttctatcggagcatatttattgctcttggctgctattggattggttgcaggaatctttttagtttataataatacaaaaaaacaacaaaactgacagaataactaactgttagttttttcttattgaaatagtaggaatactatgctatattatataggaaaagaaagtcttcagggcagggtgtgattcccgaccggcggtaaagtccgcgagcataagctgagtaggtgaaattcctacaccgacagtatagtctggatggaagaatgacattttttagttaataattaatgcctttttgtcatggagattagtattttcatgatattttttattataaaggagaaattattgtggaaactactaagacaagaaaattagtattatcagcagcgttggcggcattagggatgatcttgggtttgttggagataccatatcccttagccccttggctaaatcttgatttatcagaaattgttgtaattatggcaatttcaatgctggggtttaaatcagcattatttgtgtgtgtatgtaaattctttgtttcaattttatttaagggaccggtaggaccaattgcaattggtcagattactgctttgattgcttcattgacgatttgttgtgtttattattatttatcaagacatttaaaattacaaaaagaatggcagtcttatgccgtgaacatgattattacaatgtttgtatttgcaatggtaatgtttattttgaattacctgtttgtaactccaacttatttaactcaaaaaccaacttggtatacagatttaccatttgttttagatattaattcattcaatcaacaatatggtacaaatatgtccgtaccgggctttttgaatttcttatcgccttatggtcaagccatttttatcatttatttcccatttaactttatcaaagggattatttctgctattgtatattatatagtaagaccaattgaatcaaagtttaaggaggcataagatgaatattgctttaattgctcatgatcagaaaaagggcgaattgattgattttgttaaagataatgaagaaatttttgcaagacataatttatatggaactggaacgactggtaaaaaggtcatggagaatacaaatttagaagtaactagatttttatcaggaccttatggcggagatcaacaggtaggaaatttaattgcgctaggacagatggatatggttattttttttcgggattctttgacagcacagccgcatgaaccagatattagcgcgttaatgcgtttatgtgatgtacactatattcctttagcatctaataaagcaacagcattaatgttattgaaatctctgtagatatagctcttgctatatctatttttttagtttataatatgaaatatacttcacgtgaagctaacttcatattatggtggtggaaatgaaaacaagaataaaagaaatgcgcttaataaaaaatatgacacaacaacagttagccgatctggttcatgtatcatctaggacaatcatttcgatagaaaaagaacaatataacccatcactaatgttagcgtatcgaattgccgaagttttcgatactacaattgaggaattatgttgtttaaaagaaaataaagaattggaggatcaaaaaaatgcataagatcaatccccggtatattattaatgggacattgggaattattttagtatttgctacagcctatgttatttggcaaaagggctttgttttaaaatatggattagctttgctagttgcttttgttttaggggtttataatttatatcattgttttgataatgattgggaagatgaattgaaaaataatacagatgaacgagatttgtttattgcgatgaagagtggtcaaaaaacagtacaattaatgaatttattactttatgcaggtagtattattacaattgttttgtatggaatcacaaagaaaatgatgtttatgatagctgggaccacacttgtgagtgtggttgtggtgatgtttgtaatatttttcgtaataaacaattattatgaaaaacatggataaatggaaaaacaaggaggctgtgacgcattaaaataatgtgtttgtctaaaaaattaaacagcacttagactcaaatagagtttaagtgctgtttttggtataattagattatgaaaaacatcgaactgttagaatctaattaccctatagccaatggtaattatgacacatttcaatgcagacttccactagacttttttattgttatacctatagatgatccgttgacatcattcgtagagattatgaaaggtattaatacctccaagtattttgactgctctcacagaggcgataaaggctccaaccccaatatgattcttcaggttataaagtctttcctcaagggtacacatttaatattgaataggaagaagtatggaacaccagaggtgattacttacagataagcagagtgtttgaatatagacattgcaatgaatgcttaaataaagaaaaatacaaattaattacaatcttaataaacttcagtcaaaagtagatgaaaacttgagaacagctgatgggatagaaatgaaaaagcaaagaagcattcaggctgaagacacatttggagttattaaacaggagatgaattatacaagactgagaaaaagaggaagtctagatgtgaaaacagagctttttctgatcggaatagcatataaatttaagaaaatatcataataaaaagcataagaatagaaacagcatagtttcttaaatatcaaaattttaaaaacagaagagcgatattttttataatactcaaaaagtcatacacatgcgaataattttattattctaaaaactcaaaaaataaaaaaggcataacgcttaaaggtttaaaaacctttattcgttacagcctctttctatcgattaatcttctacttcgattgcttctacaggacaagactcagcagcttctttagctgaagcaacatcatcgccaacaacagatgctaatccttcatcattcatttcaaaaacatctggtgcaacacctgtacaagcaccacatccgatgcaagattcgtttactgtaattttagccattataaattcctcctttgttatgtatctattatatcccaaataaatatattttccaatattttataaaggaaataatgaaaaagtatgttataatgtacgacgaaagggtgatttcgagtgaatagttcacgtgtaaacaaatatcgcgatttacgagctggtttaaaagatgaagcagggattaatcgtgaaaatatagaggatacaattgatatcattgatgatattgaagatgatgattttttagcgacaataaatcgttcttttaaacaagaagaaaaagacttgccagatattaatgacactttgacagaagctaaaacttttgaacaaatgcgtcaagaaagcagtgaagaaataaaccgagctttgcgaagtgctaaggtcagtgttggtaaagaagcgcagtacaatacaagaatggatattttaaataaaattagagaaccagaaaagcaagtagttcatatcgataatctggataatatcaatacttcagaattttctaaagggtattttgtaaatcaggaggaatcggttgttacaaaagctgaagaagaaaaaaaggctgctaaaaagaagatgactttaatggaacgacttgccagcatgtcaccagaagaagatgctaaaaaagctaagctggtaatggacgaagttcaggaagaagcagagcaaaaagaaaatgaacttgaagaagcattgaaaaaagatacaggtgttgtgagttctggaacagctgaggacactttagaagatgaagaattggcaaaaattgaacaaacacgttcgttagaggaaatgcttcgacagattaaagagaaagatcagcgagaggttgaaaaagtacttaaacaaaaagaagacacagcagatttaaaagtgattaaaaatcaaacaaatgataaaactatagatagtaaatcaaaggcaaaacaatctcgtagtgatattgttgatgaaaagaaaagtgatcgaatcgctactatcttaaactatgtaattatattcctagtagttgtatttattggattgtgtggtatgataggataccagttgttcttttaaactaaggttacccttagtttttttcaaggagtggaggatattatgaaaaaaatttctattgccgttgacgggccaagtgcggctggtaaaagcagtattgcaaaaatagttgctaaacgattagattatatctatattgatacaggggcaatgtatcgttgtgtaggatattattgtcttgaaaataatattgatttaaaagatgaacaagcggtatctcaggctttgaaacaaatcaaaattgaaatggatagtaataaccatatctttttaaatgggcaagatgttagccaagtgatccgtcaagatcaagtttctatgtctgctagtgtagtatcaagttatcaggcggttcgtacgtttcttgtagaacagcagcgtcagatggcaaatgttggtggtgtgattttagatgggcgtgatattgggacagttgttttgccaaatgcagaattgaaaatatatcaaattgctagtgttgatacccgtgctaaacgtcgttatttagaaaatcaagagcgaggattaacagcagatttagagctgatcaaaaaagatattgaacaacgtgattatcaagatatgaatcgcgatatttcaccgttaaaacaggcagaagatgccatcgtattagatacatcagcgatgactttacaagaagttgttgatgctgttttaaaattagtagaagaaaaaataaaggaggtataatatggcaggtgtagtagcaatagttggacgagcgaatgttggtaaatcaactatttttaaccgaattgttggagagcgtatttccattgtagaagatgttgcgggtgttactcgtgatcgtatttatgcaactgcaacatggttgacaaaagaattccgtttgattgatacgggaggaattgaattacaagatgcatcttttactgcccaaatcaagatgcaggcagaaattgccattgaagaagcagatttaattgtttttgttgttaatggacgtgaaggaataactcgtgaagatgagtatgtagcacgtcttttacaaaaaacaagtaagccggttttattggctgttaacaaaattgatgataatgcttttaaagatgatatttatgaattctataatttaggaattggtgacccaattgcagtatcaggaagtcatggaattggaattggtgacttattagatgaaatcattaagaatctcgattttgttgaagaagaatttgatgaagatgaaattcgtttctcaattattggacgaccaaatgtcggaaaatcatcgttgacgaatgcgattcttggtgaagaaagagtaattgtttcgaatattgaagggacaactcgtgatgcgattgatacagcatttgttaaggatggacaaaaatatcgtgttattgatactgccggaatgcgaaaaaaaggtaaggtatatgaaaatattgaaaaatattcaattttgagagccttatcatcaattgaaaaaagtgatgttatcgttgttgttattgatgggaatcagggagttattgaacaagataaacatgttgccggttatgctcatgaagctggtaagggagtaattttagttgttaacaaatgggatttagttgaaaaagatgagaagacaatgcaaaagaaagaaaaagaattgcgtagtcagtttaaatatttggattatgcgcggattattttcttatctgccaaaactcatcaacgagttcaacaattattcccattgattcaagagtcatttgaaaattcacataaacgtgttcaaactagtgttttaaatgatgttcttgttgatgctcaagcaatcaatccaacaactacgttcaatggtggacgcttaaaaatcttctatgctaatcaggttagtatttgtcccccaacttttgttctatttgttaatgatcctcaatacatgcattttagttataagcgttatttagaaaatcgtttaagagattcttttggttttgaaggaacgccaattcatattatttgtcgtaaacgtgattagtcgtgctattaattaattagtttggtataatattgatacaataatataaggaagtgtaacaatgagtaaaattgcggtactaggaactggaagttgggcaacagctttaagcagagttttgatcgataatcaaaatgagataatgatgtatggtattgatcaagaacaaattgatgatattaattttaatcatcaaaacgaagctttttttcacaatatttctttagaaagtgaaattaaagcgacaaataatttagaagaagccttaatggatatggattatttattaattactattccaacacaatttgttaaagaaacattagaacaagtaaaaccattaataaagaaaaagattacagttataaatgcagctaagggttttgatttagggacaaatatgcgtatgtctgatacgattcgtagtgtgcttgatgagaacttgattaatccggtcgtttcattgattggtccaagtcatgctgaagaagtagtcgttcgaatgttaacgacagtgtgtgctgtttcgttagatgatgatactgcccgagatgttcagacgttattttcgaatgattattttagagtctatcgattaaatgatgaagttggggctgagtacggggttgctattaaaaatgttattgcagtggcggctggagttttaagtggtttaggctatggtgataatactaaggcagcattaattactcggggtctggcagaaatggttcgttatggaacgaaaaaaggtggtaaattagaaacctatatgggattaacaggtgttggagatttaattgtcacttgttcatcggtccattcgcggaattttcaggctggtctagaaattggtaaaaccaatgatgcacgtgctttcatgaaaaataataaaaaaacttgtgaaggaattcgtacttgtcgagttatttatgaagatgctaagaaatttacagatattgaattacctattataaatgcgatttacaatgttctatacaataatcatgaaccaaaacgtgagattcaacagctgatgcgtcgagaattgaaaattgaggggtaacgttatttaaatattatcatagtatatagtggtgataatatgaaagatgaagatgttttattagataaggttgtaaagaaaactaatgttaataaaggagaaatattaaaattagctaatgatttacagtctaaagatttaaataatgaaaatgatattaaggattttattatgagtgtggctaaggtgactaataaaccaatcactcctagcaaggttgataaattagtttcgatgattaaatcaaataaaattcctaaagatatcgacaagatggtctaagacaatatagtaaaataaacgataaaaacaagtattttttaggttgacttatggtattattttatatataattgtcattgcggttatagaagggtgattattttgaaatacaatttacaatggattgttaagcatcgtggaaaatttgattttgaagagggactaacttttccttcggagttatttgaccagtatgctcaaattaatgacttgaaggacattattgtctcaggaaccggagatcttgatttgaaagataaacgtttatatgttgatcttaatattaaaggaactatgattcttccttgtgctattacacttgaagatgttgagtatccttttgaaattaattcaactgaagtgtttgcttttgaaaaacctgatccacttgaagatgttcatgaagtaaaaaaagatattgttgatcttaccccagtggtatttgaaaacattatgctggaagtaccgatgagggtcgtcaaagatgatgctaatattaaatctaaaggaaaaggttggagaatattagataacagtactagtgataaagatgatgattatatcgatcctaggttagctaaattaaaagattattttaaagattaaataggaggttatactgatggcagtaccatttagaagagtttcaagtacaagaagaaataagagaagaactcatgataagcttacagcaccagctgtagttgtatgtccagagtgcggtgaatacaaaatgtctcataaagtttgtaaacattgcggtacttacaaaggacaaaaagttttataagaaacggcgtcttaagggcgctttttttgttgtttaagggttgattaacgaaattttacgttaattgaccctttttttgtttaattgtcgaaatcttcttatttaaagaaaatgctatacaaagtatcgaccagggtatataatggtggtaagaagtgttaatttgtgttactaagtgttaaagagtgggtgatatagatgttcatgggtgaatttaggcataatattgacgccaaggggcgtcttattattccttcaaaattaagggagcaatgtggcgagagtgttgtaatcactcgcggttttgatggttgtctagctttatacacccaagaaggctggaatgactattatcaaaaactccaaacactgccaaaaactaaaagagaggcacgtaactttgttagaattattacttcaagagcaagtgaatgtgaatttgataaattagggagagtaaatattcctaatgttttaagaatagaaggtaaattagaaaaggaatgtatcatcgttggcgttggtgatcatgtagaaatctggaatcagaatatttgggatgattattatgatgccaataaagataactttgatgaaatttctgaatcgttagaaggttttgaattataggagagagcgatgtttgatcatgtaacagtattattgaaggaagccgttgagggcttgaatattaaagcagatggaatttatgttgattgcaccttaggcggagcaggacatagttgtgctattttaaagcagcttacgaccggtcatttgtattgttttgatcaagatcaaacggcaattgaagcagctcgtctacgccttgatgcagttggtaacaactatacaatcatttattctaattttgtaaatattaaagaaaaattaaatgaattaggtgtaacaagagtcgacggaatattgtttgatttaggtgtatcatctcctcagttcgatacaggttctagaggctttagctataattatgatgctcgccttgatatgcgaatggatacatcaaatccacttgatgcttatgcaatcgttaatacgtggccgtatgaaaggattgttgaaattttatataaatatgctgatgaaaagtttgctaaacagattgcacgtaaaattgaacaaaaacgacaaatacgaccaattgaaacaacttttgaattagttgatattattaaagatgcaattcctgcttttgcccgacgtaaaggaggtcatcctgctaagcggacttttcaggcccttagaatagcagttaatgatgaattaaatgtctttgatcgagccttaaaggattcactagatttattgaacgttgggggtagaatttcagttattactttccatagtttggaagataaaatatgtaaatatacatttaatgatgtaactaagttaaaggatgtgccaccgggattaccagtaattcctgattacttacagccgagatttaaattaattaataaaaaagcaatggttgcttcaaaagaagagcttgaagttaatcatcgcgcgcattctgcaaaactaagaataatcgagagggagtttgaaaatgagacataagactaaaaaaactaaatttgaagctttttcacaaagatttctagtaatttcaatggtaatttttgtttttggaattattggcgttaagtcgatggaatcatcatataatcgaacagctcaagttctagaaaaggaaattaaaacgataaagagtgatattgatagtttagaaatgcaaaaacaagaattagcatctttttcacgccttagttcagtagctaatgctaaaggatatacatatagcaatgattcagtagctgcctctactcaagcacaacaaaatcaataatgaatcaatttaaaagtgcaaagatagcttatgttgtctttgcattagttattttttcccttgttgctaatattgtttatttaggagtgacaggtaagcatttaatcagtggggctgatatcgccacatttgctaaaagtagaggtaaggcaaaaacgattgattatgcaacccgaggggaaatttatactagtgataatgaagttgtagcttcaaatgtaaaaaaatataaattaatcgctattgtatcaagtagtagaattaatcatggcaaagatgatgcatatgttaaagatattacggctacagcaaatgcaatagcaccaattattgggatggacccaactgtaatggctcaaaaactccaagaaaaggtagatgcaggagcatatcaggttgaatttggaaccaatggtaatgatctaagtgcgggtgtcaaaaaacaaattgaggatactggattaccaggtttagaatttattgaaagtaattctcgtaattacccatatggagatttttgcagctatattatcggttatgctaaaggaactgaaacggatggagtcaaaggacttgtcggtgaaatgggtcttgaagcaatttatgacaaaactttatccggtgaaaacggttataaagtctatcaaaaagattcaaaaggatatgttttaccggacggaatcttggaacaaaaagacgctgttgatggagatgacatttatttaacgatcgacagttcattacaacgagatcttgattaccagctggcaactgaagcagcggcggcacaagctcttaaagcatcatgtgtaatcatggaggctaagactggaaaaattttagctttatcaagttatccttcatttaatccaaatgagcgaaatatagaggactataaaaatttcttttttgatactgcttatgaatgtggttcggtttttaaatcatttgtttatgctagttcgattgaaagcggcttatataatggtgcagctacatatgaatctggtaaatatgattatggtggttcaagaccgattcgcgaccataataatggtgctggatgggggagtattagttatgatgaaggtttttatcgttcaagtaacgttgcaatttgcaatctgcttgaacgcgggtatactaatcgtgatgaattactagatgtatatgaaaaattaggttttttccaatcaagcaatattgatggctttgattcagttgcagggacagcgttatacaaaaccgataaaagtagagcggcctatttaactacaggatttgggcagggctctaccgttacagctttacaactattgcgcgcatatagtgtctttgcaaatgatggaaaaactgttgaaccttatttaattgaaaaaatcgttaataaagaaacaaacgaagttacatataaaggtaaaacagaatattcagaacaaatattttcttcacaaacagttcaacatgttcgagatctactaaaaggagtagtaactgaaagtatgggaacagcaaagaaatttaatcttgataatggtgttcaaattatcggtaagaccggaacgggacaagtagttgttgatggtggttattcaagtactatttataccaaatccttttcgggaatggcaccatatgaagatccgcaaataattgttaatattgttttccaaggtgctgataatgatacaactcaacatcaggcaaatgttattaaaagtgtaatgccggcagcattatcaatcgtaaataaatataatgctcctgaaactacgacagtatctagtgattataaactagattcatatgttaatcagagtgttagttttgttaagtcaaaattagaatcaaaagctgtaaatgttcaagtaatcggaaacggtaatacagttcttgaacaatatccagaagctggttctaaagtagcaaaaaatgatcgtgtttttattaagacggaatctaatgatattgtattacctaattttactggctggtcacgtaaagatgttttaacttttggctcgttatcaggggttaatattactattgatggcggtaacggtctcgtcggagctcaaagtgcgccagagggaactgttgttcacaacggtgatgctctaacaattacacttcagtaaggtctaatgaccttacttttttcatatagtgtagagggtgattagatgatctatgagataacaaaaaagaaaatcaaatgggtaaaagtagtaacagttttgattgtaattgcaataattttaaaagttggctatattcaaattattgatcgagtcaatatttataataaagcagtggatttatggcagcgtagttttccagttgaagctaatcgtggattgatcgttgatagtgataataacgttttagcaacaaatctaacaactgcttcactagttgttgttcctagtcaaattaaagatgtggcggctactgctgataaaattgcaaatattttaaatgttgatgttaaagtaatgcaagaaaaattaagtaaaaaagtttcaatccaaagaattcagccagaaggacgacaattagatgatgaagtagcagcacaaatcgatcgtttaaaattacctggggtatatttaattaaagatactaaacgatattatcccaatgataattatttaggacagactcttggcttcgtaggaattgataatcaaggattattaggtttagaattaaaatacgataattatttaaacggaaataacgggagtattgattattatatggatgccaaaagtaacccgttgtcactgtatccaagtgtttatagtgctccaacgagtggctttaatttacaattaacgattgatggtgatattcaggatattgttgaaagagaactgaacaatgcatatgacacttataatcctgatggaatctgggctttagcgatggaaccaagtactggaaaagttttagcgatggcaagtaaacctgattataatcccaatgattatcaaaatgccgataaggatgtttataatcataatatcccaatttggaaatcttacgaaccaggatcaactttcaagatcattactttttcatcggctttaaatgaaaatctatttgatatggataaagatacttattttgataaagggtatgaaattgttggtggtgcccgaattaagtcatggaaaaaaggtggacatggacttcaaacctttagagaggttcttcagaattcttccaaccccggatttgttgaaatcggtcgccgtctagggaaagataaattatatgaatacgtcaaaaaatttggtttgacagaaaaaaccggtatagacctaccaggtgaatctaaaggaattatgtttgattatgatgccttcaatgagttggaacaagcaacagttgcttttggtcaaggtatttcaattacacctatgcagctggtgagagcagtttgtgcttgtgttaacggtggaactttatataaaccatatttggttgataaaattattgatagttattctaatgatattgtttatgaacataaaccagaggcactacgtaaagttattagtgaggatgcttccaaaaaaatgcgagatgctttagaatcagttgttacagatggagggggtaaaaatgcctatatagatggttaccggatcggtggtaaaacaggtactgcccaaaaagcagtaaatggtagttatgttgatgggggttatatcttatctttcattggtattgcgccaattgatgatcctaaaattgttttatatgttgcaatggataaccctaaaaattgtgtgcagtatggaggaacgacagtagctccaattgctcgcaaaatgcttgttgatattttgccaagcatgaatgtaaaaaaagtttcttcacagcggcaaaaagcttatacatttatggatactaaaacgttaaaggttgaaaactatattgggaaaagtaaaaaggaagttagtaatccggaattaaaatttgaatttattggcgaaggtgataaagtaatagaccaattaccacgagttggtgagtcagttgaagccggatcaacaatcgttattatgcttggttaattaaagcttaatttgactttttataatgtttataatatgataatgaaaaacattaataataaggagaatagatttattgtggacccgacccagataaccaacgttataatatttgtcattttaattattttctcaggtattttttcttgtactgaaacagcatttttatctgttaataaaatcaggatgcgaaacttagctgaagaaggaaataaaagagcactaacagtagagaagctgttatctaattcggatcgtttatttagttcaatcttagtaggaaataacttagttaatatcggtgcttcatcgttatctacatcatttgtgatttcaatttttggagattcagcaactctagtagctgcagctactggagtagttacattcttgattttggtttttggtgaaattacaccaaaatctttcgcaactaagaatgcagatacaattgctttatttttggcacgatttgttgctttagtttgtactctttttaccccagtggtatttttcttaaatatcattacaagctttttcattaaaatattgggtggcgctcgtgacagtggaccaaccatgacagaagaagatttaaagacgatcgttacagtaggtcatgaagagggggtattagaagaacaggaaaaggaaatgattcataatgtatttgagtttggtgaaactgagatcaaagaaattatgacgccaagaattcatgttgagagtattcccgatgattgttcttaccaagaattgatggaaatttatcaacgtagtcaattttcacgttacccagtgcatagtgaatcatttgacgaaattgtgggagttttaaatgttaaggatttacttttctttaatatcgatcctgatgaatttgttgtaaaagattttatgcgcgatacttttgttgtttatgaatttaatgaagttgcggatgtgtttgcttcgatgcgtaaagaacatgcaacattagcgattgtactagatgaatatggggttatgagtggaattgttacttttgaagatattgttgaagaaattgtaggcgaaatcgatgatgaatatgatgctgaagaagatgaaatgatcatttctctaggagaaaatgaatatttaatagatggaagcttgaatttaaatgaagttaatgatagagtaggaactgatttcgattctgaagattttgaatcaattggtggattagttcttggagaggtatctggtgttcctgaaattgatgatgaagttcagattgaaaacgtaatttttaagattgtaaaaatgcataaaaacagaattgctcaattaaaagtgacgattctagaagaaaagaaagatgaagaggaagagcatcactagatgacttcctcttttaaaaaggagattgtaggatgaagaaaaatgtagaaattaaaaaattagggattaatggtgaaggtatcgggtatattgatcgaaagatcgtttttgttcctggagcgttgccacaagaagaagttattgttgaaattattaaacagactagaacttatagcgaagggaaattactacaagtagtaaaaccatcaaaagatcgtgttacgcctaagtgtcgttcgtatgataattgtcaagggtgtacgatgttgcatttaagttatttcaagcagttgaatgcaaaaaaagaagctgtacgcgaatcaattagaaaatatacagagtatgatttatcaagaacaatttttaaagatgtaattgcggcgcctagtcaagagggctttattactgctgttaatttgcctattgttgattttaaagggaaaattagttttggaatctatcaacgtgatagtaaatatttaacattaatgacaagatgttttaaacaacatccaataattaatgagtgtttattaaaattagaagagattttaattacaaataaatgtaaaacatatagtgataaatttagaacaggattaaggtttttaaaggttaaattaattgataataaattacaattagtttttattacaggtcgtgatgggttgaaggaagaaattgttaaagaaattagtcaattgccacatgttgctagtatcttcatgtctgttaatacttcaaagcatcaagagtttgatgagttaggatattcaaaattatatggggcaacgagactagagttgcacgatgataaaaatcaatatctagtatcggttaaaagtaaattaccagaaaatattgagatgatgtggaaacaaaatcaaacaattaaatcattagtacaggacagtcaaaaaataatttcgttgaattgtggaattgggttattagaacttaatcttgatcaagaaattgtagcgattgatgaaaaaagatatcaaattgatgatgctaaattaaatgctaagtatttaaagaaggaaaatgttacttttattgctggtgacctagatagtaaaattgttacatacgctaaaaagaaagtctatgatactttaattattcaaaatgaacgttatggattaagtgatacaatcaaagatacaattaaaattgctaaatttaaaacaattatctatgcttgtcagtcacattcaactttagcaaaggatttagctgatttagaaaaaaattacaaattggaaagaattattggcttagatacatcttgtcataattcatacctaacaacgattgtaaaattggttcgaaaataaagcaaattatttgctttattttcatttgtaactataatatttaaaaataggaggaatggttatggaaattaaatttcaacctcaaggggtatgctcaaaacaaatagttattgacgttgaggatggcattgttaataacgtaaaatttattggtggatgttctggtaatacacaaggtgttggagcattagcaaaagggatgcaagtaaatgaggtaatcgaacgattacaaggtattcgttgtggggcaagaccaactagttgtcctgatcaattagctaaagcattagttaaatatgcgatgtagtggaataatcatttgattatccacttcttttcattttattagagtaaataacatataatattagtggtgattatatgttaatacggattaaaaagttacaatttttatgtggggcaattttattgatgcaggtactgtgtccaatgtggatcgtcccgtttcatttaattgcaacattgttatcgatagtgatcattggctggcaaagacgcttttgtgtcttgcaagtacaatatcattattatgttacaattttatattgttatcgtatttggctcttaagttgtacttcatgggcaatctttgataccgtttatatgtgtttatgtttatatttttctattatgattattcttttttcgttccgtgcaatcctctaatatctttttaaatagcttatttagtggtataatacacaatagaaaggatgtggggatagatgctaggacatttacaagtttatagttcatatagttttcaaaatagtactatcttaattgaggacttggtaaaaaaagctagtgatctccactatgaggcgctagctttaactgataaagataacatgtatggggcaatggaactagctaaatatgctaaaaaatacggtattaaagcagtctttgggttagaagcaagtgttgaaatcaatcatgagatatatccgttattactattggcaagggacgtgactggttattttgatttggttaaaataactagtgaaatttgtttgagtgaaagaggtgcgattagtttagaggcactgtcattatatcatgaacatctatttgtaatttcagcatgtaaagaaggaattattgaacgacttatcctaaaagaactggattcggaggcgttaaagtatttagaactgtttaaaaacacttttaataatttttatgtaggattacaaaaccatggtattgcaatgcaacaaaaattaaatgaacgtttagtcgctttagcaactctccaaaatattcccatttgtgtaaccaatgaggtccgttatttaaataaagatgaggcttttactttagatcttttacaagcttccgctaaaggaatgatgttagatttagaacaccaagttcaaactgatcaattatatttaaaatctagttttgaaatggagagtctttttgataaaaaatatattgaaaatactaacgatataatacgactgtgtaatgtaaccattccaacagatcaaatgcatttacctaaatacccagttcctaaagatggcgatgctggtgattacttaaggcaattatgtttagttggtttgaaaaaacgatttaaaggaaaaaacattcctaatgaatatattgaacgcttaaaaaaagaattaacagtaatcaataagatgggatttaatgactattttttaattgtttttgattatgttcgatatgctaaaatgcataagatcttagttggcccaggacgtggttcagcggctggcagcctagtggcttatgtattgggaattactggagtagatccattgcgatatgacttactatttgaacgttttttaaatgaagaaagaattagtatgcctgatattgatattgattttcaagatgaccgtcgtgatgaagttgtaaattacgttactgaaaaatatggtcatgagcatgtagcgcaaatcgttactttttctacttatggtcctaaagtagcaattaaagatcttggaaaagtactaggggtacccttgccacgattagaattgttaactaaaaatattcctactaattataagaatcgtaagagtgctcgagaagtttttgaaacatcatatagttttcaatcaatggtgaataaagatcctgcattaagaaagatcatgcctgctgtttttattgttgaaaaattgccacgtaatatttcaacgcatgcagcgggagtggttttatcaaatgacgtattggaccaagttgtcccgcttgtcagaggtcctaacaatggagttgtaactcaatattcaaaagattatatcgaagaagtcggcttgctcaaaatggactttttaggtttaaagaatttaacgatcattgattatattattaaagatattgctaagaatcatcaagttgaaattaatattaacgacattgatcttcaggataaaaaaacttatgaaatgatcagtcgtggtgatacttttggaatctttcaattagagtcctcaggaatgaaaaatttattagttaagatgcaatgtgattgtcttgatgatgttattgctgcaatcgcattatttagaccaggaccgatggctaatattccttcatatatcgctcgaaaaaaaggcaaagaaccaataacttatccattagaatgtttaaagccaattttaaaatctacatatggaattcttttataccaagaacaaattatgcaggcggcacaattagttgctggattttcattagctaaagcggatattttgagaaaagcaatgtcaaaaaagacagcgagtttaatgaaagcgatgaagagtgaatttattcaagggggaattgctaatgggtttagtgagctcgaagcagttaaagtgtttgaattgattgaaaggtttgctaactatggttttaataaatcacattcggttgtctatggatatattgcctattggttagcatatttaaaggcgaactttccattagaattttttagtgctttattatcaaatgaacaaagtagtgatgcaagtaaacttagttgtatccaagagggaaaaaaatatggtgttaaactattggcaccatcaatcaattattcaactgatcgctttaaagttgaagatggcaatattcgttattctttattagcgattaaaaatgttggttatgcaggatataaagcaattgaagcagagcgtcaaaatggtacttttaaagatatatttgattttgtttctagaatggaatcaagcaaattaaatagtaaaatgcttgatagtttaattatggcaggagcttttgatgagtttaaattaaatcgcacgacaattaaacaaaatttacataagattatggaatatgcagaattgaaaaattcaattggaatcgatgaaccaccgatcctaacgatcgttcgtgataatcggatcaaagtattggaagaagaaaagatggtccttggagtatatttgacaatgcatccgattgctttgatcaagaataacttaaaggagcaaatagttaatttaaatgaattatccaattatattgatcagccggttagagttattatggcattatcgagagtaaaagtgattgttgataaaaaaggacaagagatgtgctttgttgatggttacgatgaaactggtgaagtagatgctgttgtctttgcttcaagttttcaagttttaaagaaaatattagtacgtggtgagatttgtttaattgaaggtagagttaattatcgtgataaactatcactaataataaatcaagcaaaaaatgtacgttaaggaaggtagaaatgaaagaattagtaatgattgatggaaactcgttgttgtaccgtgcttattatgcaacggcagcaatgggaaatttaatggtaaataaagatggtgttcctactaatgcagtgtatggatttgccaatatgttagaaagtattttaaagggtaatcctgagtatttagttgttgcctttgattacggtaaaaaaacttttagaaatgatttatttgaagtttataaaggaactcgtagcgccactcctgatgaattagcttgtcagttttcaatgattcgtgaatatttaacagctcatggaattcgttatcaggaaatcgaagggtatgaaggcgatgatattattggaactgttgctgttaaagcaagcaaacaacgttttaaagtaagtattgttacaagtgataaagacatgctccaattagttgatgataatattagtgtttatcttactaagaagggggtaggagaattagaaaaaatcacccctgctaaatttaaagaaatatatggtttgattcctgatcaaatgcgcgatttaaaaggattgatgggtgataaatctgataatatcccagggattcccggagttggagaaaaaacagctttaaaattactaaaggaatatcatacagttgagaatttaagcgaacatcttgatgatttaaaaggaaagatgggtgaaaaaattcgtgataatattgatcagggattgttatcaaagcgaattgcaacaattattaaagatgtgccgatggaaatcgatttagaagaatatcgttatcaaggacatgattataatgagttagctgaattctaccgacgttacagcatgaattcattattaaaaagaatgtctttgaataatgaggaggttcaggctgaaaaagcagtcgatgttaaaatcgtaactcaattaccaattattaagcgtgatagttcattggttgtaggtgtgtatgatacaaattatcatcggtcaatgatcgttggatttgcagtttataacgatagtgaagcttatttcattgggactgaggatgccttaaattgtactaattttaaaaattttattagtgataagaaaattgaaaaatatggttatgatattaaaaagagtattaatgcagcaaaatggcatggccttgaaatagaaaattatgtttttgatcttcaattagcctcttatatattgaatccaagtttaaaagatgagattcgcagtgtttgtgagtattacgagtattacgatgttttttatgatgaagaagtatatggaaagggtgcaaagaagaaggttcctgaaacatcaagagtagcagagcatttaattaaacaggcaaaagctatttatattttaaaggatcaggcaattgaaaaattgaataatgaaaatcaatttgaattatataaagatgttgaaatgccagttgcaaaaattttagcacgtatggagtttcaaggggcaaaagttgattctgttgttttaaaacaactagaggaacaattcggtcgtgaaattaatattttagaaaaagagattcatacgcttgctaatagagagtttaatatcgcatcacctaaacagttgggagaagttttattcgaggatttaggtttgcccaatggtaagaaaacgaaaacaggatattctacatcagtagatattttgaataaactaaaagatatacatccgattattgataaagtcttaaagtatcgaacgctttctaaattatattctacatatattataggattacaagatcaagtttttatagatgggaagattcatacaatctataatcaggcgttgacgcaaacaggaaggttatcatcaaccgatcctaacctgcaaaatatacctgttaaaacaccagaaggaaaactcattcgtaaagcttttgttccggaatatgattatttagtatcttttgattattcacaaattgaacttagagtcttggctcatttagcgggtgttaaatcattgatcaaagcttttaacgaagataaagatattcatcgccatactgctagtgaaatatttagagtacctgaagaacaagttgatagtacgatgcgacgtaatgctaaggctgtaaactttggaattatttatggaatgtctgattttggtttggcagaacaagttggagtaagcgtaggggaagcgcgtgaatttatcaagcgttattttgaaaactatcctgagataaaattatatatggatagtaatattgatttttgtaagaaaaatggttatgttacaacgatgctgaatcggaaacgttttattcgtgaaattaatgaaaaaaattatatgcgtcaagagtttggaaaacgattagcaatgaattcaccaatacaaggatcggcagctgatattattaaggttgcaatgatcaaagttgatgagctattgaagaaacaccaattaaaatctaagatgatcttacaagtacacgatgaattgatctttgatgtttatcaagaagaattacaagaagttatggaaattgttgctaaaggaatgacgactgcaattaagatggatgttgaattaaaggcagaaggaagttatgccgttaattggtatgaacttaaataggagataattatgccagaactaccagaagttgaaactgttcgtagaacgttaaaaaattttgttttgaataaaaaaattatttcaatcgatgtattatatcctaatattattgaagatgatgttgaggaatttattgaagcctgtacaaatcagactattaatgatattgaccgggctggaaaatttttaatctttaaattagatgatattgcatttgtctcacatcttcgtatggaaggaaagtatcattatgttgaacatgatgagccgttaaataaacatgatcatatcattttcaatcttgacgataataagcagttacgctataacgatactcgtaaatttggtcgtatgaaattagttagtctggataattatatgaatgaaatccccctttgcaaattgggtccagagccttttaatgccaagttggaagatatttatccaaaattacataaaagtaatttaccaattaaacatgctattttggatcaaagtattattgcggggattgggaatatttacgcaaatgaaatatgttttgcaatgggtttaaatccaaatacaccggcatgtaaattaacgaaaaagagtgttcaggaacttattgaggtgtcatcagcaattttaaatgaagcgattgctcaaggaggaacgacgattcattcattttcagcgaatgggatcgatggtttatttcaagttaaattaaaagcccacttacaaaaagtttgtccaatttgtggtggtgagattaccaaagtagcaataaaaggtcgtgggacttattactgtaagcattgtcaaaaaaggagaaggtaaaatgattaattggggaatagttggagctggtcggatcgctcatcgtttctgtgaagccctggctcaagattcacgtgctaatttagaagccgttagttgtcgaacgctagagaaggcaaaagcttttcaagaaaaacatccatgtaataaagcttatgatagttttcaagctgttttggatgatcctgaaattgaagcggtttatattgccttaccgcatttatatcattttgaatgggtcaaaaaagctattcttgctaataagaaagttttagttgagaagccagctacaatgaatactgcagaaatggaagaaataaaagatttagttaaaaagcatcatattttatttatggaagcgatgaaaactcgttttgtacctggttatcaagaagcaaaaagtttggttagtgaaggaattattggtgaacttgaatgtcttgaaactagtttttgcggtaaagttgattataatcagaattcttatctgtttgatataaagcagggtggttgtttattagatttgggtatttataatattgcttatctagatgattattttaaagtacctttggatactgtcgatgttacttgtaaatatcatgattgtggtgttgatacatatgtaaaagctattttaaattttgggaaacaaactggtattgttgaatgtgcgatggatcgaaataaagaaaaccaggcagtattgacaggaacgcttggtaaaatgataattcgaccaattcatcggccgcttgatttagaagttattttaaatagtggtgaaatattcaaatatcacattgaatatgatcatgatgatttttatagtgaaatcgtacattttaatgatctaatagaaaatggtcaggttgaaagtacaataatgagtcttgaccatagcatcaattgtgctaagatactagaggcagtacgggagatgatgtaagtgaaggttttaggaataactggcagtattgcaactggtaaaagtacggtgacgaattatctaaaacagcgaggctatctagtggttgatagtgataaattagcttacgatgcactaactattgatgaggtgtgtattaaacaaacaaaaaatcgctttgatttaccagctggaccaattgatcgtaaagctttaggtcggattatttttaatgataaacaagcaaaaaaggatttggaagcaataattcatccttatgtaatcaagaaaatgcaagaaataattgtgcttaatcagcatcttgatttaatttttttagatataccgctattatttgaaagtaatttggaatatttatgtgatgcagtaattgttgtatatttaaaagaggacgaagaaataaaaagattgatgaagcgtgataatattgatgaagattatgcaaggttgatcattggtaaccaaatgagtattgaagaaaagaaaatgagagcggatattgttttagataataatcagggtcttgatgaattatatcaacaaattgaaacattattgaaaggaagataagatgagcgagttaatgatgtctgatttatatacggttaatgcaagttatcctcttgatagtattcatatgcgtagtattcaactactatatcaacctttgattggtaataatgcttgtggattatatttaagtctttatgctgaattagatcagttatcattgactaaagcccttagccttcatagccgtttaactaaaataaccggtttaagtttaaccgagcttaatgaagcgagtttaaaacttgaagcgataggattagtttctaaatatattaaagatagtgataataaaagagtatacttatatgctttaaaaacacccctaacaccaactaaattttttaatcatgctattctaggaccactcctattacaacgtctagggcaagaggagctatatcgaacaaaattatgttttaaatcatcagcgtttagtattgagggatttaataatgtaactgctaagttcactgatgtattcgatattaatttactaaatgggtgtgatgatgtcctggttgaaaaagattactttaatactaattatgggagtattgaaagtgattatgatttaacattgttctatcaagggcttgctgattatcaaataaaaagatcatgtattactcccgatgatgaagccgtaatcaaacagttaggaactttgtatcgtattaatgcaattgatatgcaaggattagttaaagattgtcttcaaaatgataaattaattcacagtgctttgattagcaaatgccgtgattattatgatttgaatatgccagaaacatttaaagaaatttatcataagcaggcaattgttcataaaagtgttacaggtgatgatgctttaagtaagcatattagttatttagaaagtattaacccttatcaactgttaaaggataaacagggggggcgagagcctttaaagcacgatttacaaatcgttgaatcgataatgacttcattgtatctagaacctggtgtgatgaatgtgttaattgagttaacactatcccaatgtgataatgctttatcaagagcgtttatgcaagcacgagcttcacagtggaaacgaaaaaaaatcaagacagttaaagatgcgatggatgaagctaatgtatacttaaaatatcgtcgtaataataacgatgataatgaagaaactgaaatcaatatggttgataatgataatgtagacatggatgagttagatgaatttttaagtcagttcgaataggagggcaagatgaagagtattcaagatattaatttgtttaataatgatgatagttttaataaaaataaagaaaatagtattaatactttaatgaatgaccataatattattaaggtattgcaggagtttaatttaagtcgtcgtgatattgaagaaaattggattgaatttcttgattataaagaagatttagatgtttgtattggctgtaaatcattaaaatcttgccctaagatttctaaaggaatggttcgtctatttaattatcaggatggcgaagtaaagctttcattacagccttgccgttatggtcaggcacattttgatgatcaaaagattttgaatgatattttattaaaaaatgttaacaataaaatattattaacgaagccgagtgacttgacaatcattgatgatcctaatggcaatggacgagtagttattaaaatgatgatggattatattaaaaatcctactaataaaggcttttatttatatggtgaaggcggaaatggtaaaagtacagtaatgggcttcttgattcggtgtcttgtaaccaagggatataaatgtggttatatacattttccaacttttctaatggatttaaaaagttcttttggtaatgagggagtcaatagttcaattgagctgatgaaaaatttagattatttggttattgatgatgttggtggtgagtcagttacgtcatggtcacgtgatgagatattatcagcaataattgcttatcggctacaaaatcaaagagctactttttttactagtgaatactctttggaaaaactaaaaaagctttatactttaaaagctggagacaaagaaagagtcgaacgactaatttcaagaatgaaagcggttagtattccagtagaattaaaaggtaaggatttacgctaaaaaaagtttgagttttagtgtaaaatattaaagatttgatggaaacatcaatctttttgtgttaaaatgtcttggaaataaaaatgtggttattaggaggaaaaacaatggttaaatgtattggtgtattaacatctggtggagatgctcctggaatgaatgcagctgttcgtgcagtggcaagaacatgtttaaataaaggtattgaagtatacggagtacgcctaggatacaaagggttatatgaaggagatttcattaaatttgatcgtcatagtactcgtaatattattaacttagggggaacgattttgaaatcagcacgtttcccggaatttaaagatcctgaaattagaaaagttgcaattgaacaaatgaaaaaagtagggatggaagctttggtcgttattggtggagacggaagttataatggagctttaaaacttactgaaatgggtgttaactgtattggtatcccaggaacaattgataatgatattccagatactgattttactgttggttttgatacagctttaaatacaattgttgacgcattagatcgtttaagagatacttcaagttctcatcaacgttgtactatcttagaagtaatgggacgtcgttgtggtgatttagctattaatgctggaattgctgatggggctgaaatgattattactagtgagattggttttgatgaatcaaaagtaattgaaagattaaaggcatcaaaagaatctgataaaaaacatgcaatcgtagttattactgaacatattactgatgttcacgaattagctaaaaaagtagaagctgcaacaggttttgaaactcgtgcgaacgttttagggcatatgcaaagagggggacgtccttcagctcgcgatcgtgttttagcttctcgcatgggtgtatatgcagtggaattattagaagctggtaaaggtggtttatgtgtaagccaagtcaatggagaaatcaaaggattagatattgaagaaacattatcacataaacgtaaaactgattttggtatttacgaagatgcaatgaagcttcgttaatataaataaaaatgtaaggtgaggaaaattaggatatggtatttgaactaaaagaaagaaaaaagaaaactcgtgtcgtttgtacaattgggcctgcaagtgaaaacgaaaaaatgttaagaaagttaattcttgctggtatgaacgttatgagattaaacttctctcatggtgatttcgaagaacatggtggaagaattgttactgtacgtaagttaagcaaagagttaaataaaaacattgctatcttattagatacaaaaggaccagaaattagaactggtgatttcgtaggtggaaaaacagaattcaaaaaaggacaaactactgttattactactgaagatattgaaggtacaagtgatcgttttacaatcacttataaagaattatataaagatgttaaacctggtggtttcattttagtaaatgatggtcaagttgaattattagttgatcatgttgaaggagaagatattgtttgtgtatgtgctaacgatggtgtagttaaaaacaaacgtggaatcaatgttccaggaattaaattaggatttgattatttatctcctaaagatacagctgatattacttttggatgcgaacaaggagtaaactttattgctgcatctttcgtaagacgggcgcaagatgttttagatgttaaaaaattattaattgaaaatggtcatcctgaaattcaaattatcgctaaaatcgaaaacagcgaaggtgttgaaaacatggacgaaatcttaaaagtagctgatggtatcatggttgctcgtggagatttaggagttgaagtacctgctgaagatgtacctttaattcaaaaacaattaattaaaaaatgtcgtgctgctggtaaagttgttattactgctactcaaatgttagatagtatgcaagaaaatccaagaccaactcgtgctgaagtaagtgacgttgctaatgctatttatgatggtactgatgcaatcatgttatctggtgagtctgctcaaggtaaatatcctgaagaagcagttatgacaatgacaaaaattgcattaaagacagaagaaactttagattatgcttcattattaagaaaagcaatcagaactgctccagaagacccttcagaagcaatttgtatgtcagtagctgagattgcttctaaatttaaggtatctgctattgttgtttatactgaaagtggatcaactgctaaacgtgtatctcgttatcgtccagaatctatggtaattgcagctacaccttatgaaccagttactcgttcattagccttaaactggggtgtaaaaggtgttgtatgtcaacctatgcatgatcgtgcagctcaattagaatatgctcaagttcttgctaaagaaaatggtgttgaaccaggggaacaaattttaattactgctggaacaccaggtgttggtggaactactagctatttagaattagttactgtaaaataattttaaatacatatagattttaagtatattgtgaaataggtatttataatttaaatatttgattttaaaagggattgattttgtgaaaagcagagtcgatcccttttaatttagtaactgttttgagcttatctggtttttaaaagtaatagcaagttgtaaattcataaaaaaatgatgaataaggaattaatatgtaaatttggcttgggttgtttttctttctatctcataaaaaataggttataataagaccggtgataaaaatggacaaaaaacataaacagcatttactagttacattgatctttacccttattgttacagcaacattattttttatgtatgatgattttgtatttcaaacatatggtgaagtagtttattatgattacatattaaaaggtgaaaataatcaattaaaagtagaaaatattgaagcgtatttggatcgtcaaagttttcatttaggagaaggacgaattatttttaaagatgtgaatttaactaacggagctgttcctacagttaaactatcattatatggagagaatcaacaaaaatttgactatgaatttgttgtagaagaatatcatagtgataatttgatttattcaattcaaagtatctcaaaaaaatataaagaaattgatttggacgatgttaaatcagcatcactaacaatagaagcaaatgatcaaaagttaagtgaagttgatttaaaaattactccagttgaacaattggaaggttcaaataaagaatatcgaattgaaaatgcaagtatttctaattcgatgatgcgtttagggacactaaaagcggcaagtgatgatgtgattaaagaataccctacagtatctttagaataccgttatttaaaagataaaaatggtgataaagaagataatgataattatgtggtatttaaaaagattactggtaaaagtaaagaactcgtcaatggtaatgattatgggacatacaatcttgaagatgaagatgatagttttaaagataaggacttaagtgtagtgattatttttagcaatggaaaagagaagtttgcttttgcgattgatttaaaaactagagaagtaggtgactattatggataagataaagaaggattttattgttatttatctagctcgtaatttattagctacttttgcaatcacagtatttagttttgtttatgatataacaaattattataacatgctgccgttaagagcatttatcaagatatttgctgataatttttatactactgcatattttttattactatggatcttgaattatctgttatttgaaatatataaaattgtaatggatgcactaaaagatcgtaataaaaatcatggtaaacttgttattaaagggaaagaaatgattgcttatgggagtatcattccaattgtaattttggtaattttattgataattgattttaatcaattatttaagttaaactttattttattggttatttttatgttattaagatcaattaaagaagaatttaaacaaagaaaaaataggctctaagagtctattttaataaactgctaatagcatgaatcattgcatcctgttgcatactatttaaagaattataatattcttcaaataatacaccaagacctgggagaattgtttcttctttcgaagcaattccgccattgatgatttctttcagttcatcaggtgaactattatgcagtttagttaataaagctttacgaatatccatataatcactcctcatctttattagtataggaagattaatggattttatactgaggaaattatggaaattagacaaattgaattagacggtcaaattattgagtatcaattaaattttaaaccaatcaaacgttgttatttgaagattgtttctggtaaagtagtagtaaatagttcttcggctttttcaattactgctatagaaaaattgattcgtgataatcaacaagtcgttttaaaacaaattaagaattatcttcctaaatatcaatatattaataatggctatgtgtatatctttaatcagcgttatcaaattgttgtacgcgatttaaatcaacgcaaagtagcttttcatgaaaataaattatttgtgtatcatcatcaagttcaagagacaatagaacgagagttaaaacaaattttaaataaatatttagaatttaaaattaaagaatatttaaaaagtaattttagtttaaatatgccggtaattcagattaagaagttaaaagctcgttggggagcgtgtttttcaaatcaaaataaggtttgttttaatttggttctagtacatctagaaaaagaattgattgattatgtaattgttcatgaactatgtcattttattcagcctaatcactcaaagctattttatcaagaagtacaaaagaggctcccggattacaaagagcgcgagaaaaagttaaaggagattggaatatgataacttctaccactaatagtacaattaaaacattgatgaaattaaaacaaaaaaagtatcgtgatgaaatgaaggcatatttagttgaaggcgatcatcttgttacagaggcattaaaagcaaatcaagtggaactgctaattagtaccaaacatattgacagtgaattagaagtacttgaagtaagtgaggaagtaatggctaaactggcatttaccaagtctcctcagtcaattatggctaagtgccggatgcaaaaagaaatacaattaaaagaaggaagacgttatttgcttttagatgatttacaagatcctggaaatattggtactttgattcgtactgctttagctttttcaattgatcaagttattttatctaataactgtgttgatttatataatgataaattacttcgctcaatgcaaggcgccaattttcaccttagttgtatttatgggaatctaacacaattaatttcgcaattacaagaaaaaggtgttgtggtaattggcagtgcacttgaaaatggaaagaatattgcacagataaatcgctatagtaagatggcttttgttgttggtaatgaaggtaatgggatgaatccagaagttcttgctaaatgtgatgatattggatacataccgattaatacgattgaatcattaaatgttgctattgcgggaagtattatgatgtatcattttaagtaacagtcacggtgtgactgttttttataatatatattagttgcagtattatattatctaagttataattaatttagataatattaacacataaaaataataaatataattaattgtgtttatattatattgttattgattgggttaattttacgaagatagataaatatttaaaataacacagtgtaaaattaaacaattaaagagttgatcagggcaattaaatgaatagggaggggatttatatgccagtgtattcaatcaaaacaataaaagaatatgctaataattatattagtaataacggtcgagagataacgaagacagttcttctgattacatcagctgtcatttttgttcaggccgttaatttttttagtcaagtgctagggcttattttaggattaattacattaacaatgccacaagggttagtttacgcatcattaaaaattgttgatcagcaagaattatctgcaattgatgatacactttacggaataaagaagatcagtaagtattttacgacttattttatttattcactgattgctgtttttgttttagctctagttatagttgcatttatattacttgtatcatattgtgatattggaattattggcggcagggacattgtttcaatcttagcacagtattggataatagtaattactttattagtaattgtcatcggaacatatgtttttcttgattgcaattatggaatgtttccatatttaatggaaacaagtgatgtaaaaaatctaagggcactaaaacgttcacgacaatttatgaagcataaaaagaaggcctatctaaaattatatttaagtttttggaaagagtatttaggattgattataattacattactagtttcgtttgtattacctacaatgctggatattagtgcaattatttttattgttggggaagcggttttaattaaacgtaagttgattatttataaagctttattttttgaaaatagtggtttggatgaataaaaacttaatatttaaaatataactatcgaataactttgcttatcgattaaagaagtcaagagctctatttttatgattatgctcataaaatgattgtcaaaataagctaaacacgttataatatctaggtataataacacgttgataaggactagtaggtaagaaagttgttatagagaggaagatatttgctggaaatcttctaacagcagcattattgaattcaccttggagtgcgactaatcatcgccgtttaagctacgttacagttaattaagtgcatgattatagatcatgaattaggatggtaccgcgagataaatcgttcctatatggaacgattttttatattataggagggaaaacatggaaaatgaattattaaaaatcaaagaagaagcattagctaaattagcagactgttcttctttaaaagaattaaatgaaattcgcgttttatatctaggtaaaaaaggtccgattcaagaagcaatgaaatcgatgaaagatatggcacctgaagaaagaaaaacttttggtcaaacttcaaacctagttaagcaagaattatcaaaagcagttgaagataaaaaagaagttttggaaaatcaagctattttagataaaatcaacgaagaaagaatagatattactttaccaagctttaaattagaccaagggtctttgcatcctttatcaacaattgtagcagaattagaagatttgtttttgggaatgggatatcaaattgctgaaggtcctgaggtagaaagtgattatttcaactttgaattaatgaatttaccaaaaggtcatccagctcgtgatatgcaagatacattctatattgatgaaaatactttaatgcggactcatacgtcaccagttcaagcacatacaatgttagctgcaaatggtgaaggaccaatcaaagtaatttgtccaggtaaaacatatcgccgtgatgatgatgatgcaacgcattcacatcaattcatgcagtgtgaaggattagtagttgataaaaatattaccatggctgatttgaaaggaactttagaagtatttgcacgcaagttctttggtgaaaagcgtgaggttcgcttacgtccatcgtattttccatttactgagccttcagtagaagttgatatttcatgtcataactgtggtggtaaaggttgtccaatgtgtaaacatacaggatggatagaaatcttaggagctggaatggttaacccacgtgttttagaaatgtgcggatttgactctgaagtataccagggatttgcatttggaattggaattgaacgggttgcaatgcttaaatacggcattgataatatccgcaatttctataatgatgatattagatttttaagtcagtttggtagaaaggagtaaaaagatggatattagtttaaaggtattaaatagatatgtaaaggttgatgatcaagatcctaaagaattagcagataaaattacttcaattggattggaagttgaaggaatgcacgatttgactagaggaaataacatgacaattggttatgttaaagagtgtatgccacatccagacagtgatcatttaaatgtatgccaagttgaagttagacctggtgaaattagacagattgtttgtggggcaccaaatgtggcaactggacaaaaagtaattgtagctaatccaggatgtgatttaggtgatggttttgttattaaagagagtaagatcaggggagttgagtcgaatggaatgatttgttcaattgctgaactcggtttagatcaaagacttttaaaaccagaagataaagatggaattcatgttttagacactgatgctccagttggagccgagccattagaatatatgggattaaaagatacgattttggaaattggtttgactccaaatcgtgctgattgtatggcaatgacttctttagcttatgaagtagcagcaattttaggtcgtgaagttaatttaccagaagtttcatttatcggagcagagggaagtggaatcagcgttaaagttgaaactgatttatgtccattttttggtgctaaattagttaagggagtaacaactaaagaatctcctgaatggctaagaaatgcacttattgctagtggaatcaaaccaattaataatattgttgatatttctaattttgtaatgttagaaacaggacaaccaattcatatgtatgattatgataaattaaataaaaaggaatttattattaaaacaggatttgattgtaaagaagtaatgttagatggtgaggaatataaaattgaaccagctgaccttattgtatccactgatgctggaattggttgtattgctggagttatgggtgctaatagtactaaaattgatgagaatacaaccaatattgttattgaagcagcaacgtttgatggggcaacattaagagaaactgctcgacgtttaaacttattgactgatgcctcacaacattatattaaaggtgctttaaatactgcaaattctttaatgattttagaaagatgtgctaatttattagttgaattagcagaagcaaaagaagtatatcaaagtgtaacaactgatctaaaaatcaaagactgttttgttcgagtaacaacatcaaaagtaaatggggtacttggaactaaaattacaactgatgaaatcaaagatattttcagtgcactaaaatttgagtatactattgatggtgaagaatttaatgtgaaagtaccaacttatcgtaatgatattactttagctgcagatttaattgaagaagtagcacggatgtatgggtacgataagattccttcaacattaccagagatgtcgatgactgttggaaagaggacagatgttcaagcaaagaaacatttaattagaaacttattaaaagatcaagggttacatgaaacgttgacgtattcattaacttcaccagtaatggttgatgactttaatatttttcacacaaatgagtctgttaaattagcaatgccattaggtgaagaaagaagtgtaacaagaaaatctataattggatcgttattacaagtaatcaattataatcaatcacataatattaaggatgttaatatttttgaattatcaactacttattctaaaggtgtagaattacaaaatcttgcaattgcctgctgtggtgaatacaatggtttaccgtttaaacaaatttcatataaagctgattattatttagtaaaagggtttgttgaaacaatctttaaaaatttgggaattgaagaatctcgttataaattagttcgggctagtcaagatgataagtattatcatccaggtagaacagcgtatattatgattggtaaagaagttgttggggtcgtaggaaatattcatccattgatggaaaagaaatataatgttaaagatgtttacattgttgagttgaatctaacaacattattaaatttaaaaacaagcaaagtgaaatttactgaaatcccaatgtacccttctgtaagtagagatattgctttggtgatggatcaggatattcctacttttgatatttgtcgtaagattgttcaagcgagcaaacagctagttaaagaaacaaaaatttttgatgtttatgcaggtgagcatattgaagctgggaagaaatcagttgcaattaacttgcttttccaagatccaaaaggaactctagaagaagcaacagttaatgctgcaatggagaaaattttagcagctgtggaaaaagattttggagcagtgcttagagcataataaaaataaattagcgaagaaatagacgtatttgtttatttctttttttaaatatgtaattcatattatttgacaaggattggaaccatgattagaatagagttaaagaggtggttatagtgcaaaaaattacattagaaattgatggaatgatgtgtggaatgtgtgaaagccatattaacgatgctattagaaaggcattttcagtgaagaaagtcagttcctctcatagtaaagatagaacagagatcattactgctgatgaacttgatgaggataaattaaaagcggttatcgatgctactggctataaagttacatcgattacaaaagctccatatgtaaaaaaaggtttttttgcatcattccgtaaataataaagaaatcaggataaacctgatttcttttcatagtaggagtatagttttcttgctagttcgctcattctttgctgattgactttacagattttccgatcataagtatataggccattgatttcgttttcaatatcagatatttgagtataaatacaaccgcaaagtccattattaattgagggtataaccatttcttggtacattttttcgattttatcggttagttctttttcgctatttgttttaccatagccatattgttttttattgctgttaagatgattattgattggccgagtatagccaccacattcacttaataatagaggacgttcaaggtttgttgacaagattttatttcgaaaataaatatgacgactgacaacatcgctatttttttgactaaaccaccctgaggttgtatcataaaatcttgttggatccaactctttacaaatttgatacatttcatcactattaaattgaccccagccttcattaaaaattgtataactaatgatactagggtgattatatagatggctgattgtgtcgatcatatgttgcttaaaaatattttgttgtagggtatttttgtaacgtgtgtctttaaaatttataaaccctaaagttggaaggacggtatcatggataaaacggtattcaccattattaaccatatcctgcatcacaagaatgcctaatttatcacaattataataaaatagctctggctcgatcttaatatgtttacgaataagattgaatcccagtttttttatattcataatctcagttttgtaaaaatcaggatgttccggtaaaaataaaccatcatgataatatccttgatctaagataccatgcaaaaaaatgggagtatcatttaatagtatttgatgtttttttatttcaactgttcttaaggcaaagtaactttcaatataatcatcatcagtggttatagaaaaagtatataaataaggatcatcgggagtccaataatgagggttatcaatggtgatatcagtatcttttgcagtgtaagtctttttaaaatcattattttcaatagtaacagtatatcgactggcctcagtatttacttttaaattaatgccggttaatgagggggtaattaacagatctttaatacaattttttgaaacggcttctacccagactgtctgccaaattccggatacttgagtataccacattccatggctttcacgactttgtttaccgtaggggtaatcatgcgataaggagtctgtaactttcaccactaatttatttacgccatcattaagtgatgaagatatatcaaaataaaaaggtaaatatcctcctgagtgagaaccaatatatcgattatttacatatactttagtaagttgatctacagcaccaaaatggaggagaacctggttatttgcatgatagaagtctataggtaaaatgaaatccttttggtatactaatgtatcatttattattccatgataattagatagtggtgcttgaggaggatagggaatattaatactgagatcatttaattgccaaactccatttaaactgaaaaaactatttctttttaattgaggtcgtggatattccatagttaacacctgctttctttactttaatgatacagggatactggcttcattgcaattctagttagaatttattaaattattattgttattccaattgactattcccctaggtataggtttatactagtgatagtagggggaataatatgaatattggtgaagtttcagattatttaaaaattactaaaaaagcaattaatttatatgaagagaaaggtttacttagacccaataaaaatagcaatggatatcgtctttatggagaggaagaaattaaaactctaaaacaaattaaaattttacgttctcttgatttctctttgagtgagataaaggatatcattattaataatgaatattgtttttttgataataagcttagtgaattaaaaattagagattacgatttacaaaaaaagattcaatatcttgatctagttaaaaatgattttattcaaaatgaaattattgagaatatagaagaatatcgagaattattaattcgtgaatcaaaagaagaaatcaaagataaaaatatatatgttgattttgaaaaaatactaattgttgtctttacattttttacaactataagcatatgtggaagaggtaggatatctggggaaataataattattatttatctacttattttaatttgtagtacggctttattgcattatccgcaatcgcgtaaatttttttatcaattgtatcaaaagttgcaagaatataagaggaaagataaatgatttggttaattattataagtatcgtgttgattgcaggagtattaggtttcttaaaaatattagttacgaagaaatatttgatccatcaatataatttaggagttggtgtgcagtatcgggattttactaaagagtattatcattataataaagaacgaagtattgacgaagaaacttttatagattttgaaatgccgcaaattttaaagaaaattaattttacttatagtgagataggaaatgagtacttgtataatttattttttagagaaaataataatttagatactcaagaaagtattattgataaattgaattgtcaaaaaaaattagcagagagtatttatcagctgaataaacttaataaagcatatgtaccgatcttatctattaaaagaagcttgctaaatatttcagctaaatcgtgtttattagcagggctgtttttgatacttgatgtggttagtataatagcagcaataattgatatagagaatgtttattttgttgttataatgttattattgagcattttaatgaatacccaattatctcaaaaaacaggaaaaattagtcttcagatatcattaattaatgatatgcttcaaattaccaataaattattaaaaataaatatttatcctgattcaaatcagactttagtaatgaactcatttatccatttgaagaaaatgacaaaaacaacatattattttaataaaataaaacagtttgatattttcaatattttggagttaatgaaatcattattctttattgatatatttcaagcagttaaacttagtaggaaagtagatcaagtacaaaatgatatcatggttctttatgagaatatcggtttgttggatgtatgtattatgattaaggttattcgtagtctttatgatacttgtataccaaccatattaaaagatgaaagagttgagatagtagaggggtatcatttattgatagaaaaaccgattaaaaatactgttgtaatatcaaatgatacgattgttactggtagcaatgcctctgggaaatctacgtttttgaaaatgttaggtgccaatttgttgttagcaaaaaccttaaatattagttttgcaaaggaatttaaatattatccgtttgctttgatctcatcaattcatatgaaggatgatattatgaatggagatagtttttatgttaaagaaatcaaacgtttaaagcaaattactgaatttgctaataagcaaaaatcattaatcttaattgatgagattttaaaggggacaaatgaaaaagagcgaattattattgcgctggcattaatgaaatatttatttaaatgcaattctatgacgattattactactcatgatattgaattaacagaagtctttgatcaagtagataaatattgttttaatgatattaaaaaagataataaaatcatttttgattaccttattaagaagggagtttgtactgttggaaatgcaatcgcgatagttaagacattagattttgatcaagaaattttaaaggaaattaatgataaaatagaagttttttgaagtaaacctcgttgcttggacacacatcacattctaaataatagaggttcatttcattttaggcttctattttgggatacttttatattctaatgatataagctgatttggattttttgataaacaggataataattttgttgctctaaattctaattcaagtgcgggatgatgataactggaaaaattagtgactaatttatattcacagcttttttttattttgtttaaataagcctgcccaacattattcatctttaatactcgaatatagtcgatttgcattgcttcagcaatatcttctttactattattcatcaagatatgaattaacatgcgctgaattcgtgagcgtgtataacgtttcgaagtaaggcttgttattaattcatccatatgattagtgataactactttttctttaagtaaattttcaattccttcgtcgactaaatgcaaatgttttaatgttggcgcatcagtagttaaaattttataacgaaggaagggataaaagtcatcaaaaaagtaaaattcttgatagtcttcatagtcacaaaactgatttgatatatcaattttattttttaaagcatgacggatagcacttgctgaactaattgattcgatgtccaagctatggaaatcatttgttcttttaatacagtgtaattcaataggataattatgattaattacttccttaacataggcaagccctaataagtcattaggggtagtaacagttttattcattaaaatagatagtgcctgattacaggcatctggataacgcaaaccctgattcatctgtttttttactaagttatcataattcttttgattatttttaatcgtgaaggcaatatctttgaaaatattgatatttccacattcgcttccaaaaacaatatcagtgacttttagctttgctaataattcaattgctccttgggcaaaataatcagcactttgaacactataaacaaatggcagctcaattactaagtcaatgccatttttaattgcaactcctgctcttgtccacttgttactaattgctggctcaccgcgttgaacaaaatgtccagacattattacgatcgtaacatctggtttaattagttgttttgctttattgatatgatataaatgtccttgatgaaaaggattgtattcgacaattagacctagtactttcatgagttcacctttattttacgacatgataattttttgattactttgaaaatagttgaaataatcaagattgctaaagcaagactagcagaaatcgctagtgtatttaaaaagctatctaaaaataattcactgttaccttgcgtacagtatagcattgtttgatagattccacgtccaggaaccagagggaaacagccgataattaaaaaaattgtggcaggagctttatagattcgggcggatatctcagaaaataaagcaacaaatgccattgctaaaaaataacagctgatttcacttttaaaatttgaagcaagcaaatagactaaccagcctaatgccccgccgattgacccgattatagcaaagcgtggatgctgatgaatacgaaaaataaaagcaaacccgagacatgcaatgaaagcactaaaacattcaattatactttgcatattaccctcctaagaccatcatcattgttccaaccccaattgcaataaaagtggctgttaataaagcctctaacattcgtgccattcctgaaatatgatcactacccataatatctcttaaactattggtaatagcaaccccaggagttaaaatcattaaacagccaatgatagtagactgtaaattggttattaaacctaattttaaagaaattattgctatggcagttaaaaccatgcttgataacaatgtactgacaagattatttatttctaatatttccattaaccaaataaagaaatataagataaatccaattcctacagcaataattgtttcgtggattccaccaccaaaaaaagttgtaaaaaacccagttcctaatccataacctagaaatactaagggcatgttgattggtgcgttttttattttttcaagtttactttttaaatgaatatagtcgggacattcttgacaagtatagcggactagattatttaattcatagaccatatctaaattaacacgattttgttgagtccgttttgataaagtatatgtatgattatcatgcatttcaatcgttagagtaaagtatgaaggtaaagcaaatacttcaacatttaaataaccataacttttacacattctcaataatgattcttcaacccggtaaatttcagccccatgttttaataaaagccgcccaatttcaccgattaaattaattaatttttgctcgttcataacccacctcgataatcaaaagtataccatgaataattgtttaatgatatatcatgattgttaatatttgtaataaattatgataaaatagctaagaggtaggtgagaaagtgtttaaaaaatattattataacaattcagctttgatcatttatattattgaagaaaaagtaaaattttatgcaattgtcataaatggtttttataaatattttaaagaaatgtttcaacgatttgtaattaaagttaaaaagaaacaacagaaaaatttagttaaaaaaacagcaaataaccaaataataaggctgttattgataaagggagaataataatgttacttcaagtctctggacgaactgatatatgtgcactttatcctaaatggtttgttaatcgattaaaagcgggatacatattagttcgaaatccttataatgagcatcaggtctcacacgtagatgttactccagaagttgttgattgcatctgcttttgtactaaagatcccaaagcaatagtcccctatttgacccaaatagacagcatgggatacaattactattttatggttactattactgcctatgatttagatattgaaccgggattaagaccaaaactagaaataatgaagacgtttattgaattaagtaagatgcttggaaaaaagcgggtgatctggcgctatgatccagttctgttaaatcaacgttatacaaaagtatttcattataaaatgtttgaaaaaatgtgccaactgctctttccgtatacagaaaccgtaattattagttttcttgatatttacaaaaatattattggtaagtttgatgagttaactgatcatgatgtaatagaattggcccagcggtttggaaaaattgctcaaaaatatcaacttcatattcaaacttgtagtgagaaatatcatttagaggaatatggaattgctaaaggtagttgtttagatcgaggatatattgaaacgttgataggatatcccttggatatcaagacaaatactaatcgtgccaattgtagttgtttagcgagtattgatattggtgcatatagctgttgtaatcatggatgttcttattgttatgcatgtaatcataatttagttgcaaaaaatatggcaattcatgatgatgaaagtccgatgttgttaggaactttatcatatgatgataaagttaataaaagaattgttgcttcgaataaagttcgccaaattaaattagatatataactagtaaaataaagactaatttaattagatgatatgataacctcccagtagacagtgtaaataattaaacattgatacaggaggtttttatattgggaagaaaaaataaatatttaaaagaactaaaattaagtattgtcaaaagatatttagagggtgaaggatcaaccatctccttagccaaagaaataaatacatcaggcaatatagtgggcaactgggtaaaaaatataatgcatttggtgaaagtgcatttgatatttctaatacaaatgcatcttatacaaagaatttaaaaaaataggtcgtattagattatctcaacggtgggggatcatatgatgatttggcaataaaatattgtattccgtcatctagtcctataaaaaattgggtaaaattgtataatagtcatatagaactaaaagattatattcctggaggagaagatatctatatggtgaaaagcagaaagtcaataaggaagaacgtattgaaattataaagtactgtcttgaacatgatatggattataagataacagctaagctgtttgaaacaacttacgctaatgtttttaactgggttaagaagtataaggaaaaaggagaagatgatttaggtgataagcgtggctgtcgtaaggatgatgaaaaagttgatgaagttacattattaaaacgtcagctcaagcagaaggaatacgaacttgaaatggtacaactggaacttaagctttcttgatctttatgatagaatagttgtcggttatgaagttggtgatcacaataataacatacttgtctttaacacatttgataaggcggttaaagataatcctaatgcacgtcctttattccacagtggtagaggtttttaatatacaagttcagtgtttataaacatgcttaagggacatggtatgacacaaagtatgttaagggttcactgttgcatagatactggaccaacggaagggttttggggaatcatgaaatgtgagatgtatcattacggaaaatattacaatacaaaagatgaacttgtcaaagctgttgatgattggattcattattacatgtatgaaagaaattagagaagatttggagttaagacaccatatgaagttagaaatgaggcattctctttacaaacaccaaatcaatatccagtacctgaaaataaaagaataataaaatataaaatagaacactatacaagcagcacaatattagctgcataaagaaaaaatgaagttgtcgatgagacaacttcaataataattttaattatttcatctgtctacttgacaggggcggttcaagagaattagtccttattatttaatcattatatttaacgactttacgataaccagtattaaagtcaacctcgttttctaaaggttcatttttgattagatgattaatatttctaattgtcaattcggtgaaatattctcggacactatcccactcaaatcctccagaaacatgcggtgtaattaaaacattatcaaaatcccaaagatcatcgtctgtcttaaaaggctcaggatcaattacgtcaagcgctgcaccatacaaatgaccagctttaagaacctcttttaaatcctgagtatttacagcactaccacgaccaacgttaacaaacaatgcatcagatttcatcattaataggcgttttttgttaaaaagattaatggtttctgtagattgaggtaaacatgaaatgataaagtcaccatggggtaagatttcttcaagtttatcaatcgtatataattcatcaatatccctaggtattggagaaacattcctttttataccgatcgttttgcactcaaaagcttttaaacgtttagcaagttcataacctagatctcctagtccaacaatgattacggtactatgataaatttcttttccgccacggtagcttttccacgaatgttcatgcatattattaatatagtttttaaaatttttatttaatgctagcatcattccgatagtatgttcagcgattgctttaccataactgccgctagcattggcaagacgtgttgccgcatgtagaacaccttcttgaatataatagtcactgccagcactattcagtagtattgctttaagattgggacgattaagttccacatgcttccctggattaccgactaaaatatcacaattgtcaatcattgtttgggtcacttctttttccttactgtatgtaaatgaaaaatccggaaaacttttttctagtttatttatttcatctgtttttaatcttgataatactaatatgttcatctaaatatcctcctatataaatcttattatagcacactatcacataagacgtatgatgtatttgcgaattgtttattgaatgctgatataattattaaattataaacaatgctgtttagttatcaaaattatgctaaaatattatctagataatactaattagctaggaaagagggaaatgtatgttattgaaagatcggagaaaattaatcattattggtgttgtggcagttgcattaattataggtgcagttttttttattttttcacggggtaaaagtgctgatgattatgtaaaagaatattatggttatttagaaaataaagaatatggaaaaatgtataatatgttaacaaagggctcacttgctaaaacgagtcaaaaagtatttgaggctagatataaaaatatttatgaggggattgaagctaaaaatattgaaattaaaattggcgaggttgaagatgggattgttaattatactttaacgatggatactttggcaggaaaaataagttctgaaaataaagttgaagtaaaagatggggagcttgtttataatgaagcgatgatcttggaaggattaaaagaagattataagataaaaattaatactgatagtgctagtcggggaaaaattttggatcgaaatggtaaagaacttgcaactaaaggggaggcttattctgttggtttagtccaaggcaaactaaatggagaagctgattatgaagcaattggcaaaataattggaatgagtcgtgatgaaataaaaaaagtaatgagtgcttcatggatcaaagatgattcgttcgtaccgttaaaagagatggcaaaagatgaagaaggaaaagctaaagctcaacaactattaacaatcaaaggagttaagctaaatactgtaagtgttcgttattatccttatggagaagctgcttcacatgttacaggatatttgcagcaagtaaatgctgaggatttgaagaaacataaaaatgaaggctatagtgaaacttctttaattgggcgaagtggaattgaggctgcttatgaagcagatttaaaaggaactgatggtaaagaaattataattattgataaaaataataaattagtagaaacattagctactaaaaaagttgaaaatggtaaagatataaaattaacgattgatgctgatttgcaacaatctttgtataaagaatatcaaaatgataagagtgcttcggtagctatgaatccaaagacaggtgagattttagccttagtatcaacaccgtcgttttcaagtaatgattttatttttggttttagtagtgctgaatggcaagcattaaatgatgatgctaataaacctttaacaaatcgttttagagggacatatattcctggctctagtatgaagccaattactgcagcaattggtttagaaagtaataagatagatccagatgaagattttggagctaaggataagtggcagaaagattctagttggggtaattattatgtaacaacacttcatgctccaaagcctaataatttgaataatgcaattatctattctgataatgtttattttgctcgagctgctagtgaaataggaaaggaaaagttgattgagggatatgagaaattaaagattggatcaaaaataccttttgaattatctttaaatgcttctcaatatcaaaataaagatagtaaatttgatgatcaacaattagctgacagtggctacgggcaaggtcaattattattaaaccctgtacagttagcatcaatatatggagcgtttgttaatgaggggacgattgctcagccttatttagttattgatgaaaaacctaatgatgcatggatcaaagatgtttttagcaaagatacagttaagagaatcaaagaggctttagtaggagtgatcagtgatagtaatggaactgggcattcgatttatcatcaagatatcgaattagccggtaagactgggacagcggaattaaaatcttcacaaaatgatacaagtggtagtgagattggctggtttacagtaatgacaacaaatagtgataatccggttttaatcacaacgatggttgaagatgtaaaaaatcgtggaggaagcggttatgtagtagatcatatgaaagcaccgttaggtagttatttatatcgttaaaaaaagtaagcgtaagcttacttttttataatttcaataacttgctggatatcttttttaccaaaatacacatcttgatcatttatgatcatacaaggaactgacataatttgatattgttctttaagttcggggaaatgtgccaaatcaaatacatgggcatcaacattattattttcaattgcaattctttggcttgccattactacatctgggcacatagtacaagaaagggagacaactaccttaatgttggttggtttgttaatttgtttaatttcattgatgatttgcgtatcaagcggttgtttaggaccaactgcattatagattgcaattacaaaggaattaaattcatgaccaccaggaacagcatgataactaatatttaaataattattattttcatcatagaaacgcattgctggtgaagagtttgattcttcgaactgataggaaagtttgtcactgagagtagtaaattcttcaataaatgatttgatttcaccagcaagtttactatgatcgagggagcatttaattattaattgtttttctaatttagcaaaaattggagccaactgttgttttattttgggggtaataaaactatcatcattttcacttgtttctttgcttgtttgtactgcttctttaatctttattttcttgggggaaagttttaaagcagtaacaatattagggatatacttttctaatgaggtcgcagcagtagcgccatcactgactgcagtgacaacctgacgtaattctttgacacaaacgtcaccagctccataaacaccatcaagattagttttttgattttgatcgacaattaagtttccatagttatttaattcaacttgatttttgaatatttcagttgctggctcataacctgcaaatacaaagattccaaatgtgttatttgcttcggcacgatatgaccaagtttcaccagttgcgttgtttttaaacgttgcttgttctaactggtgattacctttagcctcaattatttccgtgttataatgaacttcgatatttggatgatttttagctttatcgctaacttgtttagcacaagtgaaatcttcctcacggacaatgattgtaactttacgagcatatttggttaaaaacacggcttcttctgcagcagcaaagccaccgccaatgacaaaaatatctttaccggtaaagaactcaccatcacaagtagcacaataggctacaccatgaccttgaaattctttttcgcctggaaaacctagtttacgtggatgagaacctgttgctaaaacaatcccaatacttgaaaattcacctttatcagtgatgattttttttactggttctttcaaattgacccctttaaccgttgcaagtaggaattctgcaccaaaattttgtgcctgttgtcgcatcgcttctgttagttcttgaccgctagtttgtaaaattccgggataattaacaacttcagaagtaattgttatttgaccaccgattttttctttttcaattacaagaactgaaaatttagctctagctagatatatcgcagcggacagtccagcaggaccaccgccaacgataatagcatcataaagattagacattttagattaatcctactagatctagtgatggttttaatgtttcttctcctggtttccattttgctggacatacttcatcaccgtgctcataaacaaattgtgaagcttgaacacgtctaaataattcatcggcattacgtccaacgtttccagcgattacttcatacataacaacttttccttctggattaatgatgaaacttccacgttctgctaaaccatcagcttcaatatatacatctagatcttttgctaatttagcagtaggatcagctaacattggataattgattttcttaattgttttagatgtatcgtgccaagctttatgaacgaaatgagtatcacatgatactgaataaatttcacaatttatatttttaaattcttcgtatttatttgccaaatcctctaattcagttgggcagacaaatgtaaaatctgcaggatagaagaataagacattccattttcctaataaatcttcttttttgattgttttaaattcattttcatgaaaggcttgagcctcaaattctgttatttcttttccgattaatgacattgtttttctccttttttttattaattttcaactacttggcttatcatccaaatagattttgtgaattctttaatataatcatccattaaagatgaaattaaataattattttcattatctgcattattttttaatgatttaatcctatctaataaataattaaaatcatttagaactactttatagatatcttttgatgcaatatgttcacctttgacttcttcaattgcagaaatatctaagaattcttgcattgatgctgctggtttaaaaccagtcatcaagatagcttccgcaacttcatcaatggctttattaactccgttatatagttcttctaattttgcatggacagtaaagaaatcttttcctttaatataccagtgataactttgtaatttgtggtattcaactactaaatctgctaatagtttatttaattgtttatccattgtgtttcactcctttactatttttattaccttttgtcgacaaagatttatagttatttaggttagctcttgctaactgtataaatcttaacatggaatgatgatggatacaaatattatgcacctttattttttatttatgccaaattagtattttattgtattatttagagagaataaattaataaataaaaaaagtagatttaatctacttttttacaagactctcgttcaattaaagtacatgggagtgttattctcattggagtaggagaattatatttgcttaaaatattatataccatacttgctccatattcccccataagtgatgctggagcataaattgttgtcagtggtggattagtgaagctggctgccttaatatcatcaaaaccaactagtgaaatatctcttggaacactgagattatgttcttgaagagctctaagagccccaattgcgattggatcgctggcacaaaaaatcgctgatggcaaatctttttgattgatcagatccatcatcatggaataaccagattcagttgtaaattcaccttcaagtaaatattttttgtaaataatcttatttttgttacaataatcaataaatatttctttacgagcatcttgatatacaacattgtcttcaagatattctttaccgcctaaataaccgatcttatgatgatttaaagattttaaataatctaaagcatcaataaccgctttgtggaagtctaaagtgatcgtactgtcatcactatttggactatgcatatctagaaagataactttatttgaaatctttttaaattgagaaatttcattattattaaacttaccaacacaaactaggccatctacacctttcaaaacatctagatagttttgatcggctctaaaagttctaataacatttatattattttgtaagcaaaagttctcgataccttgtcttatttgtaaataataagggtcatcaatttcttgttgcaatgaataccattgaacaattccaatcgtgaattcatttttggttgcctttcttttctttatatagtttaattctttagctgcattaaataccgcctgccttgtctcttcaggaacagataatgttttatcattgtttaaaattcttgaaacagtggcactggaaacatttgctagctctgcaacatctttaattgtagccatgattaccctccttgatgtacttaatattataacctattttcggccaatataaaagttccaagcggtagaaattattttttctatgtcagtatatttaggttcccaacctaatatttcttttgcctttgtattattagcaactaattttgcaggatcaccagcacgacgtgccgcctttgtaactgcaataggcagatttgtaacttttttggcagcgttgataatttctaaaactgaatagccctcaccattacctaagttaaatatattgcttggatttccagcttttaaataatttaaagccttgatatgcgcatcggcaagatccattacatgaatataatcacgaatacaggtaccatctttagtatcataatcatcaccaaatacataaatactttctctaattcctaatgggacttgtaaaattaatggaatcaagtgtgtctcaggattatgaagttcaccaattttaccatttggatgggcaccgcaagcattaaaatatcttaaagctacaaaactcattccataagcgctagaacaccatttcatcaatttttccattgctaatttagtttctccgtatggattagttggatatgtttcatcgtcttcctcgattggaatacgtttaggttcaccataagttgcagcagtagaagaaaagacaatatgttttacactatgatttttcattacttcaagtaaaacaatcatgccataaacattattatcataatattctaatggctctttcatactaacaccaactaatgaattggcggcaaaatgaattacaccatcaattttttcttgttcaaaaacattatttaaaaatgttttatcacgtagatctccttgataaaacttggctttaggatgaatcaattctttaaaaccagtttgaaggttatcaacgataactacctcttttccattttcgattaattgatatacagtatggcttccaatatagccagcaccacctaatactaatatactcattttgagtcccccttttttatttttacaacgctattataattctttagtaaacattagtcaataaattagtaaatatttacttataatttagtaaaaatgattgacaatatttatagttagagctacaatataattgtgtaaaagggaggaattactataatgaaccatgaaattaatcggttaattcagtttgctttagacaaagagatgattactaaagatgaatgtgattattcagtaaacctattattagatttatttgatgaaaatgactttgaatatgaagagattaatgaacacttactgttagcgacacctatcttagaaaagatgttggatcatgcagtaacaaaaggattaattgaggataataccacaagtagagatctatttgatactaaaataatgaattgtattatgcctagaccccatactgtaaatgaaaaatttaagcagaaatatatggtaagtcctaaagtagcaactgattattattacaaattatcaattgcttctaattatattagaaagagtcgtacggataaaaatattatttggaaaaagtatgttaaatatggaaatattgagatttctatcaatttatcaaaaccggaaaaagatccaaaagaaattgctaaagctaaattgattaaatcaagcggatatcctaaatgtttattgtgtaaagaaaacgttggttttagtggcgatttgaatcgggcggctcgacaaactcatcgaattattccaattgaattggcgactggaaattattatttacaatattcaccatatgtttattataatgagcattgtattgtgtttaatgaggaacataagccgatggtgattaatgagaacacgtttaagaatctgttttcatttttagatatatttcctcattacatgattggatcaaatgctgatttaccaattgttggtggatcaatcttaagtcatgatcactatcaagggggaaattatgaatttccaattcaaggggcagaagttttaaagacactaatttctgataaatatccaagtacattgattgaagtggttaaatggccattatcgacagttcgattaacttcagagaataaagaagaattagtcgctttatcagtgaaaatgttagattactggcgccattataatgctccagttttagatataatctcgcatacaggagatattccgcataacacaattacaccgattgctcgtcgtaaaggtgataagtatcaaattgatttagtcttaagaaataatcggacaagtacaaaatatcctgatggaatttttcaccctcatcaagaatcacatcatattaaaaaagaaaatattggtctgatcgaagtaatggggttagctattttaccagctcgattaaaagatgaattaaaattattaagtgactgtttattgaaaaaaacaaagattgaagaatatccagaattagataaacaccattcatggtatcaacagttgttagcgcaacatgaatttacagagacaaatattgatgaaatcttgaaggaagcagtagcaattaaatttgtcaatgtattagaagatgctggtgtttttaaaatggatgattatggaattgatgccttaacaagtttcgtggaaacagttttgaaaggagaataagatgataaaggtaatcgaaaagattgatgataaaattgatctaattcaaatgaaaaatgatgatttagaagttgttgtttcaaactatggttgtacgattgttaaagttttaatgaaagataaagatggaaatattgatgatgtagtgctagggtatgatgattttagagattatcagactaaagacgcttatttaggggcattagttgggagaacagctaatcgtatcggtaaaggtaagtttactttaaacagtgaaacttatacgctgccaattaataatggtcctaattgtttacatggtggggtcaaaggtttttcatatcagatatttgattatcaaatacttgaggattcaattgagtttacttatttgtcaaaagatggtgaagagggatatcctggtaatttagcattcaaagcaatttacactttaaataaagatactttaattgtacgttatcaagcaactagtgataaggatacaattattaatattactaatcattcgtattttaatttgtcgggggctaaagaagatatttataatcatcaattgttagtgcatagtgataaatatgcatgtgttgattctgatggattaccgactggtaaatttaatctagtaaaagatactccatttgattttaattcaatgacaagaattggtgatgtaattgatagtgatgatgagcagcttaaattaggtgccggttatgaccatccgttcatttttaaccaagataaagaccaagctatattatatcatgaagctactggacgtaaattgacagtaagtacatcattgccgggagctcaaatttatagtgctaattatttagatggacgtatcggtaaatatggaattgtatatccaagaagattcgcattatgtattgaaactcaaaatcttcccgatgcaattaatattgaagaggacccaacaacaattttaaagaaaggtgaagtatatgatgaaataacatcatataaatttgaggtaataaaataatgattaaagcaacaattttagtagaagaattaaataataaaaagtatgatgagttattaaatgatatttatgtagatacaaatcttttagattatcaacgtgagcgatatgttaaagcaatcaataaatatgtatcattgtatggtgataccgatgtagaaatttacagtgctccaggacgtagcgaagtaggaggaaatcatacagatcatcagcatggttgtgttttagcagcagcagttaatcttgatgcaatcgctgttgttggaagagttgacaataaaattaaagtattatctgatgattttgatattgcgccaattaatttagaagacttagaaataaaaaaggctgaagaaggaacatctgaggctttaattcgtggggtatgtgctcggttaaaagaattaggatataatgttggtggttttaatgcttttattactagtgatgtattaatgggagcaggattatcatcttcagcagcttttgaaacgattattggtactattatttctggtttatataatgatatgactattgaccctgttgtaattgctcaagttggtcaatatgctgaaaatgtatactttggtaaaccttgtggtttaatggatcaatgtgctagttcagtaggtagcttgattaatattgattttaatgatgtggctaagccaattgttaataaagtagatgttgatttttctaaatttggacacagtttatgtattgttgatacaaaaggatcacatgctgatttaactgatgaatatgcagcaattcctatggaaatgaaaaaagtagctaactattttggtaaagaatttttacgtgaagtagatgaggaagatttctttaatgatatagcaggtgctagaaaagcttgtcaagaccgggcagttttaagagcaattcatttatttgaagaaaataaacgggttgatcaagaagttaaggctttaaacaatagtgattttgaaacatttaaaaaagttgttaaggaatctggagatagttcttataagttcttgcaaaatgtgtatgcaaactgcgatgttcagaatcaaagtgtttcaattggattagccatgtcagaaaaaattattggccgaaatggcgtttgtcgggttcatggtggtggttttgcgggaacgattcaagcttttgttaaagatgaatttgtaactgcttataagactgaaattgaaagagtttttggtaaaggaagctgtcatgtattaaaagttcgcaagtatggcggtaaaaaagtaatttaaaagttgggcagaagaaagtgaactctgttatttgagcatattaaaataatggagcttcactatagaaatgcccttttttaataggaggaaaaatgtattatttgggagtagacttgggcggaacaactattaaagcaggactctttgatgaacagttacaattattaaaaatggttcaaaaaaatacaggagcaagtttgggtgcagatatagttttaaaaagaattgaaaaatgtttagaaatattagttttaaagaataatctttcatttgaacagatagatgctctaggtataggagtaccgggtttgttaaatcgaaatgacggtatttctttattttctcctaattttaataattggcacaatgtcaagatcaaagaatggtttgaacataagtggctgattccaactgtaattgataatgatgttagaatgcatctttatggagaattgtattttggagctgggaaagggttttaaaaatattattttaattgcaattgggaccgatttaggttctggaatcgtagtagatggacatgttttatacggtgcaaatgacagtgtcggagaaattgggcatatgaatatgtatcgtcatgggagagcttgtcgttgtggtagtagtgggtgcttgggtaggtacgtttctgcagttggaatgatcaatacgtttaaagaaaaggatattgatcatatgagtattgttaatagatgggtaaataattgtgatgagatcactgcaaagatgatctgccaagcttatgatttaaatgattcgattgccgttgcgactcttaaagagacaggagaaatacttggttatgggataactaaccttattaacttatttaatcctgaacgtattattattggtggtggagtatcaaatgcaggagagcggttattagcttcaactcgagaggttgctgctattcatgctttggaaattgctagtaataactgtgatctagtggttgcagaacttggggaacaagcgggaatgtatggtgcagctaaatacgctaaaaggaaactaatattatgatgccgtcgttaaactagataaatcatacaatagtaatcttttttattaatattagattagtattttttatctctgtgtttaatgagaaaagaaataaagtttaaaaagtacaaattaggtgaaaacagtttgtactttttaaatttggtaattattacaaatattctttgtttatagtaaaattaggaaagagaagttatcaagcttgatgttataaatgaggaaaaattgaggattgtgatctgtataagctttaaatggccaatgataaatttttgaaatatagctatttttaatcatttgaaataactaggatttaattagacaattgatctgggaaataagttatttttccttaaaaatatttttgataagcagattgttttttatatctttaataaaaaaaaaggagataattaaattttttgcacgaataatataaaaggtgctcgcaattaaatttattgtagaaatggttcaaggggaaaatggtggattattatttggaaatgtcaataagagaattaagttattgtatgacgatgaatatggggtaaattaaatatttttagtattattgattatgatgtgattatttcaactattttaccaattattctcaatgaaaatattgaaaaaatgagcatagtttgtcaacgggaggacaatcttatgctcatttatattatacaacttttaaaaattttatctatgatttgaacttgattgtcatttgtgggataatattgagcggtgataaaaatgaaagatagagagttaatagctagaattataataaatattttagatgtaaaaaattgtcaacagtgggaactgtttaccggagaagatatgtatgaacaagtttgtaattatatcttaaatattagtaaaggaaataatactgccgaagaatatgcgcgtaaaatgatggaagaaaacaaaccggtcattgataggattgttcaaggtgaagatattcctaatgaagagtataatgtgtttacggaatcttttagaaaatataacagaaagtttagaagatagtaaccctatttttaatgatattaaaaagcgcctaattttattaggtgctttttattagtgaatcaaatattccttttcgataattggcttaaatttgtcacaggtagctttattcgtcacattggaaatctcaataaacaaaatcggagtatattcttcatttacgattgaatatgggttatttttaattatttgaagaattaactctaggtcacgttcttccatagaaatattatgtgcataacagatttcttttagattatgtaatgatagattttgcaagcgatgattcactatttgccaatttgtcatatagcatcctcctttcaagctatatatgattaactcattttctatattcatattataccgctatgaaaaatggataacaaatgatatagctcattgttttttaatctacgataaagtatttttgttgttatatttaaagataaccaccctaataatatttgtttaactttcaacaaatattagttttttcttattgtgaaaaaatgtaatttattcataataaatagtttattatagaactgttcattaacgaacagtcaggagtagagaaatgaagaaaacctttttaatggcaatttatccttatttattaaagcaatataatattatgtttgaaacaatacaaaaaaagtatcaaatcactcaaattgaaattgatgtattggcatttttagctaataatcctgagtatcatcatgctcaagatattgtcaatatccgtggtatctctaaggcgtatgtttcttgttcgcttgacaaactagtcaaaagagggctcgttgaacgccaagtagataatgaaaatcgtcgttgtaattgtttgtttgtaacaccatatgctaatgagctgattaaagaaattcgggctgttcaagataattataatgaaattgcttatcaggggttaagtgatcaagataaagaacagtttaaccgattaattagccaaatttatgaaaatttaggagggaataacaatgaatgagcgacttgctaatgaaaaaatttcaaagttactgctatcactggcgataccatcgatcttagcacaaatggtaaccttgctatacaatttagtggatcgaatttatattggaagaatggaggatggagctttagcaattgctggaattggtttgtgtagtgcaattattacaataattaccgcttttactaatttgtttggccgtggtggggcaccattagcttcaataagtctaggagctgatgaaaatgaccaagcaaataaaataatctcaaattgttttagttctttagtattaagttcaatagttatcatgattgttttatatatatttggtgaagaaattttattattgtttggtgcaagtgcaaatacgttatcatatgccaaagattatttaaatatttatttattggggacgatttttgtacaattaagtgtgggaatgaattattttattaattgccaagggtatgcgaagtttggaatgttaacgttagttattggaggcgcattaaatattattctagatccaatttttatttttactttaaatatgggagtagcgggagcggccttggctacgatcatttcgcaatttgtttcctttttatgggtaatgcattttattttttcgaaacggtcaacaataaaaataaagaaagaatacttgttctttgataaaataattatgaaaagagtattgggtttagggatttcaccattttttatgaatagtacggagggaatcttacaagtatgttttaatcgacaattattattttttggcggtgatattgccgttagttctatgacaattatggcttcaatggcccaaattgtctttttaccaatggaaggaatagcccaagggagccagccgataatttcttttaattatggtgctagacaaaaagaacgagttattgaggcaatcaaaatggtaattaaggtggccttgacattttcagtaataatggtaactttgatggagttgttcccggcgctttttgttagcatgtttactaacgatccagaactaatggaattgggggtaaagatgttaagagtgtatatctttggctatattattattggtgctaatagctcttttcaacaaatctatacatcattgggcgaaggaaaaagatcatttttctttgctttctatcgcaagataattttattaattcctttgatttatattttacctaatttcattagcaatggtgtattagcggtaatgctggcagaaccagtatctgatttattaacaacaggaactaacgcgattttcttcaagcgttttatcaatgataagttgaaataattacataaaaataagaaaggcgacaggataagtcgctttttgtatgcaataaaattcacagataatctatgggtcaagaaaaagctttagtgcagagaaaattatgtagttataataggaaaagttacaaagaatatataaagagtcaattaaaagatggaataacttgtacttgatttaaaataagaattagcgtaagtggtagagacagattgcatgaaatgaaggaactttagcatttactctgtatacctgcacatgaaaatcttcagcttagccggaagataattatttatataaaatataaataattatcttattaaaagaattgaaaaatttattatattttagtaaaatatatatgtatttcactaaaatataagtaaaattggaggttattatgaaaggaacacaagcagatttaaattggttagcagatcctaaagtttttgcggtaaatcgcttaaatgcttatagtgatcattcttattatctcgatattgataaagcattgaatggagatgcaatggaattaaagcagtctttaaatggacgctggtattttaattatgctaaaaatcctaatgaaagatttgttgatttttataaagaggatattgattgtcattattttgatatgatcgatgtaccaggtcatattcaaatgcaaggttatgatcagatgcagtatattaatactttatacccatgggatgggcatgagaaattaagaccaccacatatatcaagtgacgataatcctgtaggaagttacgtttgctattttgaagtaaatgaagcattaaagaataaaacaactcgtctggtttttgatggagttgaaacggcttattatgtttggctaaatggagaatttattggttatagtgaggattcatttacgccatcaagttttgatgtaacttatgctttaaaagatggtgaaaataaattagcggttgaggtttataaacgctctagtgccagctggttagaagatcaggatttttggcgcttttcagggatttttagagatgtaagtttatatgctatagaagacattcatattaatgatctgtttgttaagactactttaaaaaataattataaagatgtccaggtatcggtcaatttagatgtaattgctaaaaaagagggctatctaaatactgctttatatgatcagaataataatattatttatcaagcaaagcaattgccattaactaatttttcgtttggactgactaatgttaatttatggtcaagtgaaaatccatatttgtataaactattgttaaccgtttatgatcatgatgataatttagtagaagttataccacaaaaaattggatttagagagtttaaaatggatcaagggataatgaagttaaatggtcaaagaattgtctttagaggtgttaatcgtcatgaatttgctgctgataaaggtcgggctattacaaaagaggatatgctatacgatatcaaatttatgaaaatgcataacattaatgcagtaagaacatctcattatccaaatcaatcattgtggtatgatctatgtgatgagtatggaatttatttaattgatgaagcaaatttagagagtcatggttcatggcaaaaattaggtgcttgtgaaccgtcatggaatattccaggaaacctgccacaatggcatgatgtcgttgttgatcgtgctaatacaatgctacaacgtgataaaaatcatccttcgattttaatttggtcatgtggtaatgaatcatacgcgggaacaaatattgttgctatggctaatcattttagagaaaatgatccgactcgtttagttcattatgaaggttgtgtatggaatcgtgattattgtgaagcaactgacatggaatcacgtatgtatgcaaaagcgaaagaaattgaaacatatttacagggcaatcctgcaaaaccgtatattagttgtgaatatatgcatgctatgggaaactctctaggtggaatgaaacattatactgatttagaagataagtatgctcaatatcaaggtggttttatttgggactatattgatcaggcagtgtactatacaaatggttatggtgaaaaagttcttggttatggtggagattttaaagaacgctatactgattataatttctgtggcgatggaattgtttttgctgatcgtactatttcgccaaaagttcaagaagttaaatatttatatcaagatattattattaagccgacagatgcaggtgtcataattacaaataaaatgatgtttagtaatactagtaaatatcaatttgtttatcaattaaaacaaggtaaaaaagttttacaggagggatgtttcatagccgatgtaaaacctggagactctaaagaaatattgattccgtggttaacaaaattagataaagaagctgttaagacagttagtgctttattgaaagatgatcaaatttgggctaaagctggttttgaagttgctttcggtcaaactatagttggtgaatataaaccgctctcagtttctaaacaaccgctaaaagttattattggtgatggtaatatcggtataagatacaatgattttgaagtgatgtttgctaatagtgaaggattaatttcattaaaatatgggaaccatgaatatatcgcaagagctccacgtcctgtttttagccgagcatcaactgataatgaacgcgggtataaacatgaggtgaatagttcaatgtggtttggggcttcaactttttataattgtactaagtttaattatgaagttgcctctgattatagtagtgtaaaagtattttttgagtatactttaccggtaattcctgcaactactgttgatatagtctttacagtacgggcaccaggtattattagggttgattatcattatcatggaaaagcaggattaccagaattaccattaataggaatgtgttttaaactgtatgatcaagttgatcgttttgaatatttaggtcgtggacctttagaaaattatattgatcgtaaggatggagcaaaaattgatgtttatgattgtcttgttaaggataacttatcgccatatttagttccacaagaatgtggaaatcgctgtgatttgcgttatttagcaataactgatgaaaaagatcaaggaatttgtttcaaaatgatcgatcagccattcgaagcaactgttcttccatatagcttgcagactttagaagctgcaatgcatcaagaagaattaccaaaatcatattttacctttgtaactattttagctgctcaaatgggtgttggcggtgatgatagttggggtgctccaatactcgaagaatactgtattaaaggtgaagaagatgttgaatacgctttcgaaatttgtaagcgttaatcaactaaaaatcttttgataaatgttatcaaaagtctcgcaagtgttttttagatgggctataataaacatgtatgataaattgagaaggaaaaggatggtaatgacgatatgctaaaaaacgaagtaatgagtaaaacaaaaattgtatgtacgataggaccagcatcagataacaaagagatgttaactaaattagttaaagctggaatgaatgtaatgagacttaatttttctcatggaactcatcctgagcatcaggcaaaaattgatttgattactgaaatcaataaggagttggatacaagcgttgctattttattagatactaaagggccggaaattagaacaggtgattttatcgatggttcaactgaatttaaaaaaggtcaggttgtcacaatttgtcaagaagatattgtcggaacaagtgatcgttttacaatcacttataaagaattatataaggatgtaaaacctggtgggtttattttggtaaatgacggtcaagtggaattgctagttgatcatgttgaaggtacagacattgtatgtgtttgtgctaataacggaattgtaaaaaataaaaggggaatcaatgtaccgggaattaaattaggtttcgattatctatcaccaaaagatattgatgatttaacttatggatgtacacaaccattcaattatgtggctgcttcttttgtaagacgtgcacaagatgtatttgatgtaaaaaaacttttggttgaaaatggtcgacctgatattcaaatcattgctaagattgaaaatagcgaaggtgttgaaaacatagatgagattctaaaaatagctgatgggattatggttgcccgtggtgatttaggagttgaagtacctgcagaggatgtcccattgattcaaaaggaagtcattacgaaatgtaaggatatgggaaaattagttattactgctactcaaatgcttgaaagtatgcagcaaaatcctcgcccgactcgtgcagaagtaagtgatgttgccaatgctatttttgatggaacagatgcaatcatgctatctggggaatctgcatcaggcctatatccacaagaagcagtaatgacaatgagtaagattgctttaaaaacagaaaatagcttagattatgatgcattacatcgtcaagctgtaagaactgctccacaagatacatctgaagctatttgtatgtcagttgcagaaattgcctctaaattccaagttgcagcgattattgcttttactgaaagtggatttactgctcgaaaaatgtctcgttatcgtcctgaagctcggatcattgctgctacacctgaagtagcaactactagagcccttgcaattaactggggagtaaaaccagtaaaatgcaaaacaatgaaaacacgttcaagtatgatggattatgctgaaatcattgcaaaagaaaatggtgttgaatcgggagaacttattttagttactggtggtaaaccaggacttaaaggggatactagctatttagagttagttcgtgttaaataatattaaggatatgacacccagcttagctgggtgtttatcataaggaggatatatgttattaaaagataaaatgaagaacggtcaattatatcgggaatttggccatgaaaatatagaagatcaagagtatgaaaaagaaattgaacgtcaaagattaaattgtaaagcaagaatgttcgagtataatcattgtcatcctgataataaaaaagaaaaacaggatattttaagagggttactaggccatgctggtgaaaatatatggattgaagctcccgcttattttgcctacggctgtaatacctatattggtgaaaatttttatgctaattttaatttggttgttgttgatgatattgaagttcatattggtaacaatgtaatggttgctccaaatgttacattatcagtaactggtcatcctgttgatccggaatatcgaagaggtggaacgcaattttcattgccgattgtaattggggatgatgtttggatcggtgcaaatagtgttattttaccgggggttacgattggtgacaatagtgttattggagctggtagtgttgtaacccaagatattccagcaaattctgttgcttatggggtaccatgccgagtaattcgcgaaattaatgattatgataaagaatattatcgtaaaggaaaaaaagttaatcttgattggtaaaagcccatgccttctttaaagggatacatattgtataataaagtgaggtgtttaaatggatccgcttcaagatgaatattacatgattgataatcagttagatagtcggcagccaattattccattttggttttggtggttatttcctccaccatggcaaccgggaccaccatggcagccaggcccaccgggaccgggaccacgacccccatggcagccaggcccaccaggaccgggaccacgaccaccatggcagccaggtcccccaggaccagggccacgacccccaggaccgccaccacgtccgccacgatggtgaaatagtaaaaaataggtacacaaatgtgtatctattttcgtgttttgataatttattgaatcttgttggaaatatcgttatacttaaaagtaagagcgaaatatgaaaggagataatatgaattatttaacattagatattggtggtagttcaatcaagtatgctttattaaatgaaacgggagagtttattgaaaaaggaagtacaattgcacctcatcaaagtattgagcagtttgttgaggtaattggagaactgtatgataagtatgctgaacaaattgttggtatggcaatttctatgccgggtgcaatagatcctcaaaagggctttgcttatactggtggtgcatataaatatataaaagatatggaaattgtaaaaattttacaagaacgttgcccgttgcctattacgattggtaatgatgctaaatgtgcggctaatgcggaagtaggatttggatgtttaaaagatgttgatgatgctgctgtaataattttaggaactggaataggcggttgtattgttcgtgatggtaaagttcatattggtaaacatttctcttcaggagaattttcatggatgcggactaatggggaagatggcaataaccctgaatgtgtatgggcagctacgaatggaattcctggcttattaaaggcagttcaagagtctgttggaacaaaagaacaatgtaatggtaaagagatttttgaaatggcaaatagtggagataaaaaggtacttgctgggcttgataaattctgtaatcgtttagctgttcaaatttataatttacaagcacttttcgacccagaaaaaattgcgattggtggtggtatctcagcacaaccattattattagaattagttgagaaacatatagaagaaatgtatcaaactggattaaaggctaattcaccaattgcacgccctgtagttgttccttgtcaatatcgtaatgatgctaatctattaggcgctttttatcaacatttacatacatgtaagaaaaattaacataatgaagcaaggcccaaacgggtttgcttttctattatatctataaataatgataaaagtagtttgagcaataaaacctctttttgattctaaccaaaaagaggtttgctaattgatatttaaaatttaatttttgaaaatattagttgctttcattttaatgaaagccttttttattatttcttcatcttgaattaaagcaattctaatatatccttctccttcgctgccgaaagcactaccaggaataaataaaataccggtttgctcaaataaatcattaacaaaatcaattgatttttgatataagctaggaatttttgcccaaataaacatagttccctttgtctctttaatattccagccaatttcttgagcacattttaaaaagatatcgcgacgccgctgataagcctctcttgtttttataacacaattttgttcaccggtaatggcttcgattgctgctaattgaatagggataaacatgccataatccatattagattttaatgttttaagctgttcaataattgctttgttgccaactgcaaatccaattcgagcaccagcaagcccataagtttttgataaggaattaaattcaatacctacatctttagcgccaggatatgataaaaagcttctacctaagccttcaaataatagttcgctataagcattatcgtgtaatacaataatttgatactttttagcaaagtcaattaatcttaaataaaacttatcatttgcaatcgcacaggtagggttgttaggatatgaaacaatcataaattttgcttttttagcaatggttggattaattttatcaaagtcaatcaaataattattttcttcttttaaaggcatatcgacaatatttgcattagcaagcaacggcccgtctttaaaaataggatagctaggattaggaactaagacaatgtcactatcgttgatcaatgtcattgctagatgtgctaagccttcctgagaacccagtaatgaacaaatttcatcatcttctaaaatgacctcataacgttttttataccaagcgattacagccttgattaattctggtaaatcattaatcgcataaacatagtttttaggatctagggcagcattagcaagcacttctcttattcttttggtagggggaatatttggcgtacccgtactaaaatcaattacttcttttccattttcacgtcttaatgctgccttttttgctaaaattgtaaaaatactttcttgaaaaagttccattcgttttgaaaattccatttaataattcacctcgtggtttattctaatacaatgaatcttaaagttaaaggtaaaaaaataaaaaagctactttataattttagttaaaatgttataaaaatatgtcttaatgttgtattttgaaaatatataatattaataaataaatttatttcaattactttccttttgtaattagggaatatataacaaattgacatatttaaaatacatctaatactattataaatatatccaaatgttataattgtcgatatagaagcgcttacagtaaactgaggaggaaagtgatgggagtatttaaaaaggaaattcaagttaattgtccgatagaaggaaaagtttatcctttagagtattgtcctgatgaagttttttcaaaaggaatgactggagaaggggttgtaatatttccaactggtaatagagttgtcgcaccaattgatggtaaaataaattttattttttcttcaaagcatgcaattgttttgaaaggtcaaggaatagagtttctaattcatgtgggtttggacacgaatcaactaaacggggatggctttaaaatatttgtagatcctgatcaagttgttaaacagggtgatattttgttaacttttgattcagaaatattaaaaaaacatcgttgtattgatgcaacaccgtttgtttttacaaatttaaatcgtaaaaatataactgttaatagatatggtatggttaatttaaatgaaccatttattatcattgaaaggggatagaaaaatgaataatgatagattatcatttaaggaaaaatattcatatggagtaggcgcaattggtaaggatatgtgctgtggaattatctttacttattgtatgttgtattttacagatgttcttaaattatcagcttcatttgtaggaacattgtttttcttagcaaaattttgggatgctgttaatgatttaggtatgggaatgattgttgataacacccatagtagatggggtaaatttagaccttggttagcaattggaactattgttaatgcaattattttagttgctttatttactgattggggattatcaggaactagtttgtatatatttgctgctattatgtatatcgtatggggaatgacatataccgtcatggatatcccatattggtcaatgttacctaatttaacatcaaatccagaagaacgagatcgtgtagctgttattccaagaatttttgcatcgattgggggttctctgttagttggtgggtttggattacaaatcatggatttccttggaaatggtgatgctcaagtgggatatacaaattttgctattgtcattgccattatttttattgtaactgtgggaattactgtagttaatgttaaatcagctgatcgagtagaagcaaagaaaccagaaaagacttcgtttagaaagatgttcgaaataatttgtaaaaatgatcagctgttagtagcaatagcaacgattttaacatttaattttggaatgaattgtattgctggggttcaaacttattattttatttatgttgcaggcaataagggattattttctgtttttacaatgtttgcaggatttgcagagatttttggtttgatcatctttccaaagttatctcaaagattaagtaaacaacaggtgtatgctttagctagtggaataccagtagttggtctaatcattttattagtaacaggatttattgctccacaaaattatattttaacagcagtagcagggatttgtgtcaaattcggttctggattacaattaggtacagtgacagtagtattagccgatgttgtagattatggagaatataagctagggacacgtaatgagtctgtaattttttcaattcaaaccttattagtaaaatttgcttcagctatgggtgctttatttacaggttttgctttagatgccacaggatatgttgctggagcttctcaaactatggcaactcaaaatggaatgcgtattattatggttgcattaccaattattttagtgctaataagttatattatttataaaaagtattacaaattaaacggagcgtactatcaaagaattatgaatataatcgctttaaggaaagaagaaaatcagatgattcttgatgatgtaacggaagatataaaaaattcaaatgaaccgattattgatttaaaggagaagaaatatgccaattaaatttcataaaacaactaagatatttcatttatataatcaagagataagttatatttttaaaatcttaaaaaataatcaattaggacaactttattatggtaaagcaatcaaagatcgtgaaaattttgatcatttatttgaaagtatgcagcgaccaatggcatcatgtgcttttgaaggcgatttaacattttctttagaacatattaaacaggaatatcctgcttatggctctggtgatatgcgtcaccctgcgattgaaatcgctcaagcaaatggtagtcgaatcatttcgtttaactatcaggggcatactattataagtggtaagcctaaattagataaattacccgcgacatatgttgaatcaccagatgaagcaacaactttattaataactttatatgataatataattgattcaaaaattattttaagttacacaatttttgaaaatatgccggtaattacaagaaatgcttacattgaaaattgcggtgaacaaaaaataactttagagcaagtgatgagtatgtcacttgatttacccgacaaagaatatgagatgattgaattaacaggtgcttgggctcgtgaaaggagcattaaggagagaaagctagagcatggaattcaatctatatattctctaagaggatgttcaagtaataattttaatcctttcatcgctttaaagcgtgaaaattgtaatgaatatgctggtgaggttttaggatttagttttgtatatagtgggaattttttagctcaggttgaagttgatacttatgatgttacaagagtgatgatgggaatacatccccactgttttagctggagtcttgaaaaaggagaaagttttcaaactccggaagtagtcatggtgtattcaaatgatggactaaataaaatgtcacaaacttaccacaaactttatcaaagacgattggctcgtgggaaatatcgtgatcaagtacgacctattttagttaataattgggaggcaacgtactttgattttgatgaagaaaaaattatggatattgctggaactgctcaaaaattaggaatcgagttatttgttcttgatgatggctggtttggtaaacgtaataatgatgttgcagggttaggtgactggtatccgaatttacaaaaattaccaagtggaattagtggtttatcaagaaaaataaataatctgggaatgaagtttggtttgtggtttgaaccagaaatggtcaataaaaattctgatttatatcgtaatcatccacagtggattttagaaacaccaaaccgtcctagtagtcatggacgtaatcaatttgtattagatttttcaaatccagaagtcgttatttatgtttataatatgatgacagaagtaattgataaagcaaatatttcttatattaaatgggatatgaaccgctgtatgacagaagtttactctagttgtcacgatagtgagagtcagggacgagttatgcatgaatatattttaggagtgtatcagttatatgaattgttaacaagtcgttttcctgaaattttatttgaatcttgtgctagtggtggtgctcgttttgatccaggaatgatgtattatgcaccacaatgttggaccagtgatgatactgatgcgctagaacgtttgaaaatccaatatggaacatcaatggtatatcctgtttcgagtcttggagctcatgtatcggcagcgccaaatcatcagttgttgagaaatacaccgattgaaacaagggcaaatgttgcttattttggtacttttggatacgaattagatcttaataaattaagcatggatgaacagataaaagttaaagaacaaatcacctttatgaaggactatcgggagattattcagtttggaacgttttaccgtttaaaaagtccatttgaaggtaatgagactgtttggatggttgtatcacaggatcagaatactgctattattggatattatcgtactttgcaggaagttaatgttggttaccgtcgtgtaaagctgttgggattagatccggataaagaatatcatgttaatcttaataatacagttcattatggtgatgaattaatgaacttgggtttaattacaactgatagttcttgcggtgaaaataaagaaaaatacgatgggactaatggagattatttatctagaatctacgtattaaaagcaaaaatataataatcctgagtaaacctcaccagttggataagacaggcttaagtgtagagctattctacggtaaaccgttattctagcttgtggggtatttatatatcaaagagaactgtttagatgagaagtttttaatcagatttaaaatagtttataggtatggatttagaatattataatcaaaaagtcataaattaaaaggattgatttctttataaagtaatcaatccaaatatttaattattatatttaattacatctttttaaaatagttatattaattcttattagtaattttcacacattctttcaaaaaaggctttaggatatccgcatgtaggacaatgttcaggtgcttcatctccttcataaatgaatccgcattgacgacatttccatccttttggggcatcgcctttgaatgttgtgccgtttttatatgattctaataattttagataacgtttctcatgggatttttcaacgatagcaacattttcaaatttaattgctaattcttcaaaaccttcttcacgtgcttcttgggccattcttgcatacatttcagtccactcttcattttcacctgcagcggctgcttctagattttcatcagttgttccaattccatgaaatgcggcaaaccacattttagcatgttgtttttcttgatcagctgtttcttcaaaaattgcagcaatttgctctaatccttctttacgagctgcttcagcaaagaaagtatatttattacgagccattgattcaccagcaaaggcttccattaaattcttttcagtttttgttcccgcatatttactagtactagtttctgctactgcttcaaatttttcttttggagctttacaaaccggacatacccaatcagtatctaaatcattccacttagcatcttgagtagcttcatcataaataaatccacaaattttacaaacgtatttcatcttcttttcctccaaatttattaaatagtaatcattactatttaattataacgcttattaaattaaaaagcaatttatattttattaatttatgaatctttatttgatatatgtttaaattagcttttttcattacaaggaattttttagtagtttattaattaaatctttctcacgtcatttttagcatttttcaataacttgtttaaaaagtttctagtatataaactttgaggtagcataaatcttgatttacgagcaatgtcttcatttattaatcggttagatttgactagagtgttagctatttgcttaataacaggattgcttgtttgttttgaaagattttgagctattacttcttgttttgctttacttcaggttaaataacctaactcattaagcattttaacttctttatttcgtggtggatagtcataagggaccatagaaatggcatttaatcacaggcgtgcgttaatacattttgaagccttaatttgatcatcttgtgtatcacttgctccggtaggacaaacgtataaatgaaggtaatctttagtgtatcggtgaatatttccttttgctctcgttttcacattattggcttctaacaattttaaacttgtcattttgtaaattggataaaattcaggtggaaagatctagtataaacaaattcgcaaatactacttaacttttctaattcttttaaataggtaatagtaatcattattaatatattataattgcaattacttacatgaataaaagcaataataattaataaaaagaatagattgatctaataatctattctttgcgttcatgaggatcattcattcttgaattatcaactaatttaaattgtttacgataatcacgtggtgccatttgatgtgaattactaaatgcttttgaaaaagataattggttagaatatccgcaagagaaggcaatttgattaattgtaagatcagtattagtaagaagagcttcggcgcgcatcattcgatactttaataaaaattcttgtggtgataaatgaagatgctttttaaataatgttgttagataactgcggttgagagaaaggtaatcagcaatctcgttgactgttaccatttcctggtaattattttgaatatattcaattgctttatcaacatatggattgtagttaggggctacattatcattataagtaatattagcacttttggctaaaaaactaaaaaaggtatacagttgtccttgaataaataactcgttactatagcttagtttattgtgtgcaagaatagcaatcgttgtttctctcaattcattgatataatcacaatgaactacaagattatgttcatctaaattacatcgttttaaatattgacgagttttagaaccatcaaagctgatccataaatatgtccaaggttcatgttggtcggcttgataataagtgacaacgtttggcattattaaaaaagcatcacctgctttaatctgatatacttggttgttaacgtgatattcaccttgaccggagagacagtaatgtaatagataatttggacgaacagctggaccatatgaataattaggtttacattcttgcatcccgcaaaatttcaagtaaaaatcttcaaaagatttattctctaattctaaatatgagtacatggaaatacctcctttatcaattataccaaattaataattagatgtgttctaaatataggcatatttcatataaataatacgaagagaggagtttacaatggaaacgaaaaatatcttacatgatatcgcaaaaaggtgcgatggggacatatatttaggggtggttggaccggttcgaagtgggaaatcttcatttatcaaacgttttatggaaatggcggtcattccatatatcgaagataaagatgcaaaactgcgtgccattgacgaattgccacagtctggtaaaggtaaaatgattatgactgtagaacctaaatttattcctaatcaagcagtagaaatgttaatggatgagaattttaaagttaatgtccgactagttgattgtgttggttatgttattgaaggagcaaaaggatatcaagatgatcaaggaatacgctatgttaaaacgccttggtatttagaatcaattccatttgatcaagcagccaaagtcggaacgaaaaaagttatacaagatcattcaacaattggaatcgttataactagtgatggtagtatttgtgatattccaggagctaattataatgaagcgactgatagtattgttgaagaactattagacattgataagccgtttattattataattaatactaaagatgtcaacagttctgcttgtaaaaaagagtatgaacgtttaaccgctaaatatgatgttccagttctatctatggatgttacaaatatggaagaaccacaaattgtttcattattaaaagatgcattatatgaatttaaaatcagtgaagtacgtatcgaggtacctaaatggttagcaatgatgtcaaatagtcattggttaaaacaaacattagatacatcattaaaagaatcattacaatcaattaaaaagtttaaagatgtagaacggattggtgatacgatcagcgaatatgattttgttgataaagcttacttaacaggaatagatacaactacttcaagtgctactttaaaaattgaagaacgtgaagggctatataatgaaatattagaagaaataattggtgataaaggatttgatcaggcaactttcttaacctttattcaagaactagtagatataaaaaaagaatatgaaggtttttcaaatgctattagaatggtaaagcagacaggatatggttatgcaattccaaagttagatgaaattgagttgagtgatccagaaattattaaacaaggacctcgttatgggatgaaacttgtttctaaagcaggaactacttatatgatcaaagttgatattgaaagtacttttgaaccaattattggatcgagggaacaagcagaagcatttattgaatatttgaattctagtggaaatgataaacaagcgatttttgattgtgatgtatttggtcgtaaacttggtgatttgattgaagaaggtatgtatattaagctaaatgcaatccctgaaaatgccagtttaagactgcatgatattttgtcaaaaattgttaataagggcaaaagtaatgtaattgcaattgtgctataaaagtgcttgaaatcggtactttttaatgttatactttcgaagtattagaattatggaggttgttatgaacaagaaagagttagtcgaaacagtatctaaagaaagaaacttaactaaaaaagatgccgaaattttagtagacacagtttttaatacaattacgcgtagtgttgttgaaggagataaagttttaatctctggatttggaacatttaaagtaaatgatcgtaaagctcgcaaaggaatttcaccaaaaactcaagaagaaatggtcattcctgcaagcaagacagttacattcaaacctagtaatcgtttgaaagatgcaatgaattaatcattgcatttttattttattaataataagttaataatatagtgtataatagagtgtaaaggagttgatatatatgccattttattattttccaatgaatagctattatatgtttgggtatttattagttattattggatcattaattatgatatatggtcaaataaaagttaatagtgcatataaacgctatgaaagaatccccaatagccgaggtataaccggagcgatggttgcacgagaaattttagatcgaaatggattgagtgatattcaaattcatgttgttaatggaaaattatctgatcattacaaccctcgaaataagacaatcaatttgtcacgtgaaattcatgatggaacatcgattgcggcacttgcggtagctagtcatgaatgcgggcatgcaatccagcatttagttggttataagccgctcgtatttagaaatgctatcttgccattatgcaatgttggacaatatttgggatggattgctgtatttattggtttgatcatgggaaatacaagtgttgcttggatcggagtatttttaatgggaggaatcttgttatttcaaattgttactttgccagtagaatttgatgcttcttcaagagcattaagaatcttaaaagctaactatctcactaccgatgaatatagtggggctaaatcaatgttatcagcagcggcgtttacttatgtggcagcgatgttgtcgacggtactgtcattattaagaattgtattgatcgttataggtaatgatcgtgattaaaaatctcttttagagattttttcttttatattatgataattgatagtataataattaagcgaggaaagttggtgttattttgaaatttttacgaaaaaatcgttttaatatattaattgtttttttagttttagttttaatagttgttagtttttatatgctttgggttcatgttccctattcaaaacataaaaatgagattacaagtattgaaaatgttattgttaaagagaataattatagtaatgttaagtattttgaccgctataatagtgataaaagttactatattattcgtgcaaccaagggcaaaaaacaacaatatgcagtttttgatgaaaaatataaattaattaaatcttatagtggtgatgtagtggatcaacaagtatgtattaacgcatttaaagaaaaatataaacaggagccaagtgaagtttcagttggttatgaaaatgaaatctttgtctattgtttaatgtatcaaggaaaggattcactggtttatgctttttatggaattgataatggggaattcgtaaaggcatatcgaattgataatggatagaatgatgttaaagagtttagttgaaagtaaatgcattaatattgaacgactactggtgttaagcgcaaaggaattaaagattgacggtaatgaatgtcatattttgctgcttatttatactttaatggaagcagggatcaagacagtaacgccacagatgattcaaaattattcgatgttgacaagtcatgatcttaataaggtgctacaaagtttattaaataaaaaacttatttataaccgagctggttcaattagtttgaatcatcttgaagataaactattacaagatcatgaatcagcgagtgctaaacaagaggaggagagtcttaatattgttactatttttgaagaacaatttggacgacctttatcaccaattgaattaaatattattaaagattggaaagaaagcgattatagtgatgaaatgattgttaaagccttaaaagaggcagtgaagagccaagttcttaattttagatatgtagaagggatattgaataattgggctaaaaatggtattaaacaacgctatgttgaaagtgaacaaccacagcgaaaagttccaattagtgaatataaatggtgggaaaatgaataaagaaaaaactaaccgagtattagaatattttgatgaattgtttccaaatgcttattgtgaacttaatcatgaaagtgattttcaattattggttgcagtaatgttatcagcacaaacaacagataaaaaagttaatcagttgacagaaaatttattcaaaaaatatccgactgttgaagcagtaagtcaagctagtttaccggaattagagcaggatattaaaaccattggactttatcgaaacaaagctaaaaacttactagcattatcacatgttttaattgagcagtttgatggtattgtaccaagtgatcaaaaacaattagagagtctaccgggggtaggtcgtaaaacagcaaatgttgtgcgttctgtagcatttgatataccagcctttgcagttgatacgcatgttgaaaggatttctaaacgattaggctttgctaaaagagatgacaatgttttaactgttgaaaagaaactatgtcgttctataccaagaaatagatggaataaatcccatcatcaatttattttctttggaagatacttttgtaaagcaactaaccctagttgtacagaatgtaaactgtttgatatgtgtaaggatccgattaaaaataaatacttataggcgcctgaggatgtctttttaataaaaaatatcagctttattaaaagctgatatttttattattattctccagggtttgaattaccaccaacagtaaaactgattgaagcactaactgtattagtaccatcactttcagtgattttaacggtatattgagcacctggtgttaatgcgaattctttagttgcactacctgtaaaggtactaggtgaaccaattgttcctcctgaagaattcataaattgaatcgtaatcgtattactactgctttgagcgtttactttaattgcaactgaactggttgctgtggtcgaaccattagtaacagaagaaccaccggaagtaattgaataatttactttatctaatttagcacttgaaccaattgttttttcgattttattagatgttggactaccgcttgaatatgcataatatccaacaacctttactttaccggttggggcataatcaatcgtaccactatttgtagtcaatttagtactatataaaagattatttgattcatcatagatttcaacaacatagacaatgtcaggatttgcaggttcataggcggtaaagctaacatctattttaccattaccattaatagaagcctcgaatgctgataaagtattaatttcagggtctttagctgctgtagttggaccatatcctgttttagcccatcctgttaagatttgactagcaggtgtattagcagtcggactatcatatgttcccgcaacaacttgaatttgttcaacaccagatggttgctcaggatatgattttttgtcggttgtatttttttgtaagtattttagtaattcagcgactactttagctggataagctttatagtcagaagtattcttaccttttttgatacctgttgtatcaaatcccatccatactgaacatgtatagtcaggggtgtaagcagtcatccataaatctcggctcttgcctgctttaacatatggactagtactgtcccagttagacgttcctgtcttagcgccaacgttatcaagtccgcttagtgatgaataacttcctgtagtactgcttgaatagcttaacattgtttcacgaatcatgaaagatacgtcttcaccaatgctttgagtaacatttttttgcaattcttcatcaattttgacggttttatttgtttcgacaacttcaacatagttgattgtatgagattcgatataattaccattatttgcaatcgttgcatatgcaccagctaattcaactggacttacaccggttttccagccaccgattgcataagtatcacttaattctttatcttggtcagacatatcgataccaacagattccatgtctttaataatcgcatcgctgccagctgctttttttacttcttggaaagttgtaatggctgggatattccatgaattaagcagggcatcagaaatactcattgaaccatggtactgaccatcccagtttttaattgttttaccgcctagagtcaatggctcgtctttaacagtattaacagtactccaatttagatatttgtaggcaagaccataatctaatagtggtttcattgatgaaccaggctgttgttttacggtagctttatttaaatcaccggatttgtagttatgtccaccgataacggcgatgatccgaccatcttgagtagattgaacactaccacccatttgcatatcttcatcgctatatttataagtttcaccattagccattgctgtagccattttttgtacttcttgattgcaatatgtatagatattcatttgagtttctgcagggtccaagccagttttttctttaacttctttagtgacgatatctacataagcagctaaagcatcgtcagaagaagtaataccttgtgataaagtattttcgacttttacttgttttgctaaatcacattcttcctgagtgatgtacccatgatcaaccattaaatttaaaactgttgctcgacgttgagtcgctttttctaaattataatatggatcatatgcacttggcgaattcaatgttcctgctaatagagcggcttctggaagcgtaagttgtgagacatctttgttaaaatagtatttactagctgcagcaattccgattgagctagtgctgcggccaaaataaattttatttaaatataaagtaattatttcttctttactaatttctttagttgcctgaattgcaagaatgatttcacttagtttacgcgtataagtttgttcttcttttggaaagtaagattttttaattacctgttgagtaattgttgatcctcccccacgaatacttaaatgagctaagttagtgatcattgttttagcaatacgtggtaaatcaaaaccgttatgttcaaagaaacgagaatcctctgcggcaacaacggcatcaatcaatacttgtggtaaatcctcataagtaacgttttcacgtttaccatttgtgtcactaccaaatgtatacattaattcaccattaatatcatacatcttactcgcttccccagaaagtaattttttagctgagaaatcatcggtttctttgtatactgaccaggcaaagaagcaacccatgcctaaacagactattaaaattacaactactagagatgtagcgacttttttccaatttaattttttctttgtttttctttttcttgtagggctatctgtcattttcgtgacctcctaaataatactgatcaattatctttaaataatctaagcggggattaaatccctgttcaattaaatgtcccttttctttaaccgtttgataagagatagatttttgatcaggttgatagtatgcatcaattacatatgatgcattaactaagtatacctcatttagatgggtaaaagcaataattacaaaagcaattccctggtgttcaatcacgctttttaaatgttcgatttgatgaacactaatattcgtaaaaggaaaattctgttttttagtttcttttgcttcaaaatccagatatttacctttatatatcccattatagtcggtggttgaaggagtcttaaaatatgcttcaacaattctagctgcagaccttttaggataatctactttaacaatctgaatcggggtaggttttttatgaatatttgcgatttttctagctaaataatatttattagtcaaatttaaatcttcttctaaattcattccccgatgacgagtatttaactttccatcaattagctttgtttgatgaacagttgtttttttcatatttggataattaaccatgcttgctcctttttattactttacgaaggtattataccatatctgtcttaaaatatcatagtatcttatgagtttccaaaacattgtcaatttaagtaaaatcactaacattatgttaataatcgattaatcgcttgcatttaagacaattttttgtttcaatataaagtagagataaggagttgataaacttggaaaagaaagtaatgttaagccctaaaaagataatagctaaagaattcaaagtagattttaaaggatataatgctgaagaagtagatcattttttagatatggttgtaaatgattatgaagcttttgcagctatgttaaatgcttcgtatgataagattgatcaactggaagcgcgtttaagcgaacaaaagatcaagattgctaaacttgaaagagaaaaggctcttcaagatgataatatccatgcgatggaagaaaatctttctacaaacgttgatattttaaaaagattatcgttattagaaaaagtcgtatttaatcagaatagataattgttaataagacactttataagcaataaagtgtcttttattatgatgtaaaagggttttgacagtaaaaatatcgatgtcaaaagtttttgatagacaattaaggggataaatgtgatgatgcaatcaggaggaagggttaatggaaattgcaaagaaaattaaaacagctcgtataaaagttgagctaactcaagagcatgtagctgatgagttgcaagtatcaagacagacaatttcaaattgggaaaatgctaaaacttatccagatattattagtattattaaattaagtgatctatatcaaattagtttggatgaactgttgaaaggtgatgataagatgattgaacatttgaatgaaagtaccaatattgttagtagtaataaaaaattaatttgtgttgctataattaatattattttattttttggcttagttattttaatactataatttcaaataataaatatttactggcaagtgtcctggtgattgctatgtgtagtattgctgctttattttatcaggtaataaaaaaattttaggagaaaagaaaatgaaatggtatgagataatattagtttttattgttttgcctggagccgtaaatacagcttatcaagtttttaagatagcagagcttgatgctcgaagtcaagggttaaaacaccctaaatttttaggatttatagcgattggaggacaaaattctagcgggctgattttgtatttaattggtcgccataaatatccatcgacattatcaaatcaagatagagaagtaatgaattcacgaaaaaagaaggttggggtcggtttgatttttattgtcagtggggcaattggactgattattaataaggtattgataggataaaaatatatctgggggtgacttctaaaggaaaattagaggaaagcctctttttttgttataaaaatactcttaaagtttagttgtttaaactctaagagcacttttaattagatattctattataaattattatcaaacattagattctcatttattaataattgaataatcttttcaaaaaggtggtgataaacaaagctgaaaatactaccggcgatattggcaacgattctaatgatgattgcatttaaaaatccaaataaatcaatggtgattgctaaggcgccaaaacagttgaaaacggtctgccaatgataactgccgctaaaacctaccatgattcctcctaaaatccctgctaaccctaaatattctttaggaactattgtaaatagtatcccaaaaattatactgccaacaacaacaaaaagagcacgatgtttaaatttatagataatttgttcatgatcgatgttgattattgacatacatgcaaatgcaatccacatagttcttgaaaaattaagcatttctccaagaaaaataaccaaggcaatcgcactgctgatttttagataccaaaatgttcgcttgctaggactaaaaaaatctttaagaatgtctttgaagttaagtttcatcgtttgttgatagtgacaatgataatagacaagtgctgtaaagatggctgcaaccatcatggcaataatccgcagagtataactgttttcgctgacatcgtttccccataagagaatataaccaagaataaaggtaaaatggttagcgtaactaacttgatgacttgtaagtattaagattagtagtaaagcgctaaaatttattaataacccaaagcccaatgggactatattggctaaatgcggagcaatagcacatattacaaaactggcaattagggctaatgtactttgtttaatattaaaatctaaatcagtaaagcgaagagataatactgccaacagaccgattattcctactgaactattttcatttccaaaaagtgttgtaaaaaaagtgataaagataatacaaaaggctaagcagaaaatatttcttaggatcattgctgcaatataacgatgtttatctttttttgtaggtgtatcactaattgcagcttttaagtttttaacatttaattgcattgcttgataaatagtcattattgtcctccttttaaggttatattagatttttttattaagttgattaattgtgtaaaatcatcagatggtaatttcttttttaattgatagatgggttctaaataataagtatatatatcatcaagatgttttcttccttgtgcagttatttttaaacaataactacgtttatcaaatgggtgtggacttttaagtaacagttcttttttatttaattgctcaataagacggcttactaatggttttgatacacccattcgtttgctgataataataggggtaattatttcatcatcgataattagtattgataataaatctagttcgtctttagtaagaacattttttggcttacctcggcgatttaataaatgcgaaaacaaacgaatttcttgtgagtaatttatcatttttatccattctggttctttcataattccacctcttagttaactttattaactatatattattcataaaaaaagaattgtcaataacgtcaatttaaaaaataacaatttttttattttaggtgtatacaacattcttgaggtgcgattgcatggtagggatggaaaatatttggataggaactggaagtttggaaatcgctgaataaagcgctttgagtaactattagaataatagttctgattaatttgcaacttttagcaagatgatattgaatcgaatagctgataggatggaagtaacagagatttttgataaaaatcttggtgtaagtaatttaggtaaaatcgttatattgaatttaatcatcgtggtgttgataaagtgaaagaaatgaagttgaaaatagtgtagcaaggattaaagtggaatatgattatataactaaagcatctaataaggaaggctattgcaaaagtaattgataaatttgttttatcacaactgtttgaaaaataatacttgttttctatttagaaataagtaaaatataatagactcgtagaaaacgattgctacaaaagtagaggaaagtccaggcttccacaagctgcgatgcttgtagtgtttgtatgtgacgaatcaataagtcacagtagcgtgagctaacgacgggcctaagacctaagcgtaagtatggttgataagccgtaaagtgccacagagactattctaatcgaaagattagctgaaaagaggtaaactctgcaaggaagaaacccaaatttggtaggggaatcgtctaaacggaaatgaacgcgaaggcggatgcatgtgcatagataaataatcgtttgaaaaacagaacttggcttacaaaacgagtcgttatttagctgaatattttcagcttttttatttgtctatttttttatcctcgtttataattattaaagaggtatgaatatgaataaacatgataaaacaagatatgtatttgctcaagcaattaaaggtttaattaaggttcatcccttggataaaattgcagtaactgatattgttacacgcagcgggatgacgcgtcagacattttatcgctactttaaagataaatatgacttggttaactggtacttcgaaaagctggttttaaagtcatttcgtcaaatgggcgatgggtgttctttacaagaggctttacaattaaagtttgcttttattaaaagcgaacattccttttttaaagaagcatttaaatctaatgattataataatctggttaattatgattttaattgtatatatgagttttataaaaacatcattgagaagaatttggggcaatcagttactgctgatattgattttttgttaaagatgtattgcaaaggatcgattgatatgaccgttgaatgggtattgggtgatatgccgattagtatagatgatattgtaaaattattgattgaagcattaccgcaacggttagagccgtttattttaaatataaaaaagtagggaaacatacttttttattactgcaactaaattgcatgacaatcacgaaaatgttacaaacgcttacatctgtaacttgaatatattgaaaaatccatgttaaaattttatcaagaaataaaacaaaaggagattttaatatggcaaacagatttattttaaatgaaacaagttatcatggaagtggtgctatcagggaaatcgtaactgaggtaaaggctcgtggctttaaaaaagcaatggtatgctcagatccggatttaattaaatttggagttactaaaaaagtcacagacttattagatgcagcaaatttagactatgtagtttattctgatattaaaccaaatccaactattgaaaatgttcaaagcggtgtaaaagctttacaggaagccaaagcggattatatgatcgctattggtggaggttcttcaatggatactgctaaagcgattggaatcattgataaaaatccggaattcagtgatgtaagaagtcttgaaggtgtagctgaaactaaaaatccttgtacacctattttggctgttcccacaaccgctgggactgcagctgaagttacaatcaattatgtaattactgatgcacaaaaagatcgaaagatggtttgtgttgatcctcatgatttaccagttgttgcatttgttgatccagacatgatggcaagtatgccgaaaggattgactgctgctacaggaatggatgctttaactcatgctatcgaaggttatattaccgcaggagcatgggaaatgagtgatatgttccacattaaagcgattgaaattattgctcgttcattaagaggtgctgttgaaaatactcctgagggtcgtgaaggtatggcattaggacaatacattgctggaatgggattttcaaatgttggtttaggaatagttcactcaatggctcacccattaggtgctttatacgatacacctcatggagtggctaacgcgattattttaccaacagtaatggaatataatgctcctgcaacagggactaagtataaagatattgctgaggcaatgggtgttgatactacaggaatggatcaagaagcatatcgtaaagctgctgttgatgcggttaaaaaattatctcaagatgtgggaattccagctgatttaaaagaaattgttaaagttgaagatcttgactttttatcacaatcagcatatgatgacgcttgccgccctggtaatccacgagaaactagcgttgctgaaattaaagaattatatcaatctttattataataagtattagaaaaaggctgtaagttttgtaccagtattctgatagttagatttttgagctaacttttgggggtcacatcaatccatagcctttttttgattttgtgatttaatgtgtttgttaaaaattacttgaccgtttatattgtcaacttgtagactaataaatggattaaaaaaattactcaattaatttcaattagtttataaatagtttatatttataaagtatcatatataaggtggtttttttaaggtatatttttttaaaatctttcataaaataaatgtgattaggttattgtcataaataataattatgatataatttatgtgtttattataggcttttttataattatggaaaaaaggaggatagctcatggaaaatattagtgaacatgttagacgagaacgtgaggctagaggggtcacgattgaagagttggccaaaggaacatttatttcagtagctgtcttaaaagatatagaatcaggtaagtttgacaaatataaaggtgacgaattatatttgaaaatgtatttacggaaaattgctaaatacctagggttagaagaaaaagaattagatgctgaatttgaagcactgacacaagaaattcagttagaagaaattcgtcaagaggatttaaataaacggttagttgaagaaaataaaaagaacattactatttctggtaaggtaagtgatacatttaaagatttaaaaaatgtaaaacctaaaaaatctatctctaataaacgtgtttatgaagatcgctatttgcttagatattttaaatatgctttagttggtgtggtttgtgtggccatcatttttgttgtttggtatgcaatcgttgcagggcgttctaatactgaagcgccagattttaaagataacaatacaccaactgtcgaaggaaataatgatgctggtaaacaagacagtgatgacaacaaaaattctaatactgatgataaaaatgaagatgataagaaggctgaaacgcccacagttgaaataactaaaaatggtgagttagattatagtattaaacttgatccaagtatgactactttcaagtttaaaatggaatttgttggtcggacatggtcacaattaaatgtcaatggtagtgattatagcggcttcaagagcggtatttacaataatgctaataaatcaaatgcaactgatgcagctccagaaatagttgaactagatattccggtagagaatttccaaaatttggaattaaaattaggatattttatgggacatcgtttctacattaacgatcaacctctagaaattgatgcaagtgaatatgatgggggtaatcatacccttaaaattacgcgggtgcaataatgaatctaccgaataaattaacagttacaagggtattgttagttcccttcttaattcttatttatatgtttccgtatgatagtgcaggaattacggttcctgtctatcatgttttggagacaaatatatcattagtaaatattatcattttatttatctttattatcgcatcaattactgattattttgatggaaaaatagctcgaaaagaaaagttaataacaacatttggtaaatttgctgatccaattgctgataagttgttaattaatacgattttcttattattggcaagtgaccagacaatcaatattattatccctattataatgatttctcgggatactatagttgatgcgattaaaatgtcagctgcgagtaaacaagtagtcgtggcggcaagtaaacttggtaaactaaagacagtcagccaaatgattgcattaggatttttattagttaataattttccttttactgtactgggagtcgatgtagctaacgctttagcatggctagctacagtaatttcagttattagcgggattgattatttcttaaaaaatcgcgagatgcttacggagacaatgtgatggatgaattagctaaaacattaatacaatataatataagtatatctagtgtagagagttttacagtaggtaactttgcagcaatgctaggaagtattcctggcatttctaaggtttacaaaggaagtttagtaacatatcaaagtacaacaaaggaaagactattaggaatttcgcatgaaataatttcaaaatatggagttgtaagtaaagaagtagcttcgttgatgtgcgttaatggaaaacaaattcttgatagtgatgtctgtgtatcatttacaggcaatgctgggcctgatgcaatggaagggaagccagtaggattagtttatattgggattttataccaaggtgtcaatatctatgaattgaatttaaagggaactcgtgaagaaatccagaaacaggcaattgattttgtaattcgaaaattgaatgaaaaaataaaagtaaattagtatttatataggtatataatagtaggaggatgaatattatggcagaagcaaagactaaagagaataaagaagaagctaaaaaagtccaagctttggatgatgcaattaagcaaattgaaaaaaaatacggaaaaggttctgtaatgaaattaggtgatcgcgctgccgttagtgttgatgtaattcctactggttctttaactttagatttagctttaggaatcggcggatatcctaaaggaagaattattgagatttacggacctgaatctagtggtaaaacaacattgacattacatgccattgctgaatgtcaaaaacaaggaggacgtgctgcttttattgatgcagaacatgctattgatcctgtttatgcgcaaaatttgggagttaatattgatgaattaattctttcacagcctgattctggagaacaaggactagaaattgctgaaactttggttcgttcaggtgcgattgatttagttgttgtcgattcggttgcggcattagtgcctcaagtagaacttgatggtgaaatgggtgattcgcaaatgggacttcaagcacgtttgatgtctaaagcgttaagaaaaattgcggcagaattaaataaatctgaatgtacgattatttttattaatcaattgagagaaaagattgggattatgtttggtaatccagaaacaacaacaggaggaagagcattaaaattctattcttctgttcgggtcgaaattcgtcgtagtgaagcaattaaattaggaacagaaattgttggaaataaagtgaatattaaagttgttaaaaataaagttgctccaccgtttaaaactacacaagtagatattatttatggtaaaggaatttcccgtgatggtgaagtactcgatttggcagtagaaaaagacattgttgaaaagagtggagcatggtatgcgtataaaggtgaaaaaataggtcaagggcgtgaaaatgctaagactttcttaagtactcatagtgaaattatggaagaaattacacaggcaatcaaagactccttagagagcgataataaaagtgagcaagaataagaaaagatagggctagagctgtttgacggctttaccctttttatggttttgtcaataatatttagatgtaaaaatagttcttatcaatacgataagaactattttaattcatctttgagttttaaaagagcagcaaatggtgaatcttcaacagcagtctgctgttgtttttgttgattcatatattttttcacatcacttttacgagccagcttatttttattttctcgttcttttttaaaggcgttcatatgttggcgataaccacatgttttacaaacaaacatctgtttgtcacctttaccaacaagttctaattttttatgacaattaggacagcgagcatttgtgatgatggaaacagattcacgatgtttacaatcggggttagagcaaacaagcatttttcctttttttccattaacttctaacatgaaatgattgcattctggacattttttagtagtaagattatcgtgtttgaatttggcttcactagaacttatttcatctattaaagaacgagtatatttttttatttcattaataaaaatatttgatttttgttcttttttagcaattttagctaattccatttcccactttgctgttaactcgggttctttaagatcttgtggaactaatttcaacaattgttttcctttgtttgtaacatgaatatcattaccacttttttcaattaagaaggtattaaataatttttcaataatatctgctcgagttgcaacagtccctaaacctcctgtgttgactaaagtagaacttaattgtttcgaagtgttttttgtataacgaactggattttccattgctgataataaggttgcttcattaaaataacctggtggggttgtttgaccagttgttttggttatttcagtgattggtaaaaattgattttgctttaatgatggtaatgtttgatcttcactatcttcttcatgaccatagacttctttccagccgatttgggtttcaattttaccagaaacagtaaaaatttcctgatttacaattgcattaattgttgtttgttcatatagataaggtggtaatagaactgccaaaaatctttttaaaactaattcgtaaatttttaattctcgatctgtaaatgaacctaacatagcaggctgttcagtaggaataatcgcatgatgatcgctaactttactattgttgacaaaatgactttgttttcttattggactttttaatattttatcaattatattgtcataatcccccccgcgactagcttctagacgctcttttaatgttggaacgatatcatcggttaaatagcgtgaatcagttctaggataagttaatactttatgatactcgtataaatcttgcattgttgctaaagtttctttagcagaaaaaccataaagtttattggcatcacgttgtaattcagttaaatcatataattgtggagcatatttcttttttgtgaaagttgagattttttctatttttaatttttgattttgaagtttcttaatagtttcatctattttggcttcattaaataaatgtttttcttttttggcagatagccaagtccagttaatttggctactaatgatttctataccataataattgcgaggaacaaaatctttaatttcttcttcacgagctgcaatcattgctagtgtaggggtttgaacacgaccacaagctaattgagcgttatatttacaggtaagagctcgagtagcattgattccgacgatccagtcagcaatacttcgactatatgcgctatgatataaagcttcatattcacgagcattttttaattttttaaacccttctttgattgctttatcagttactgatgaaatccataatcgctgcattggctttttaatatgtgctttattaatgatccatcgagctactagttctccctcacgaccggcgtcggttgctataatgatatctttaacgtcattacgattcataaggtttttgacggcattatattgtttagcagttttaccaataactactaattgcattttttcaggcatgatgggaagatcatttaaatcccacttttgataatgtttatcatatttttcagggtcagctaatgttactaagtgacctaaagcccatgtaacaatatatttatttccttcaagaccaccattaacatttttattgcattgtagaactcgtgcaatatcgcgtccaactgatggtttttctgctaatactagtgtttttgacattttttttacctcatttcttaaatattctatcataataaactactgatatgaaactaaattataaaatgataccgctatctttttttgttgatttaatcatagatatttctctttttaaaaattattatcttaaaatcacctaaaatttgttgttataggactttaacaaaaaaatatcctcgaaacacttttcattgtaaatgatgtcaaaatattatacaatattattgtgcttgtcacataatgaattcctatagattcataaaaataatttacatagaagaaaatggaggacaaatatgccaggaaatattgccttttctattttaacctatgttctagctgtggctttaggtttttttattaattatttaattaataaattaaaaatctctaaagctaacgtaagtgctgcaaagattatagatgatgcaactgccaaagcggacaatcttgttaaagaagcaattttagatgctaagacagaagcatatgagttaaaacttcaagctgaaaaagaagctaaagaacaaaaacaagaaattaatgaacttgaaaataaacttttacaacgtgaacaaacagttgatcgtcgtgatattgctgttcaagggaaagaagatgttttagcgcaaaaagtagtacaattagacgaaagagaagccggactaggtaaactagaagctgaattaaaagaaaaaatcaatgctaaaattggtgaattagaaaaaattgctgcaatgtcagcaaatgaagctaagcaagaattatttaagcaggttgaacaacaaactgctacagagatgacggcttatattaaagatcaagaggaggaagctagatcaaaagcaagtctgctttctcgtgatataatcgctaatgcgattaatcgttatgctcaagaagaaacaattgaaagaacagtttctgttgtcgctcttccaagtgaagaaatgaagggaagaattattggacgtgaaggtcgcaatataaaagcaatcgaacaatgtactggggtagatttaataattgatgatactcctgaagctattacaatttcatgcttcgatcctgttagaagagaaattgctagattatcattggagactttgattcgtgatggccgaattcaaccaggtagaatcgaagaagtagttcaaaaaactaaaaatgaattagatgaagtgattcgcaaaacaggtgaagatgccgtttttgaattaggaatttcaaaaattgataaagatattatcatgatgttaggaaaacttaagtatcgtactagttatggccaaaacgccttacaacattcattggaagttgctcatttagcaggaatcatggctgctgaattaggtttaaatcaacaactagctcgacgggctggtttattacatgatcttggtaaggcagttgaccacgaaatggaagggagccatgtggaattaggagcaaaatttgctaaaaaacatggtgaacatgctacagttgtaaatgcaattgaatcacatcatggtgatgtacctgcaacaagtgtaatatcaattttggttgctgctgctgatactttgagtgcagcacgcccaggtagtcgtagtgagacaattgagaactatattcaacgactagaaaaacttgaagaaatggcaaaaagctttgatggagttgatcgggtttttgcaattcaagctggacgtgaagttcgaattgttgttaagccagataaagtagatgacttgatgtctcataaaattgctcgtgatattaaaacgaagattgaagaagagcttacatatccaggacatattaaagttacagtaattcgtgaagtaagagcaagtgaagttgctaaatagggataggcatagcctatccttttatttgaaagggaaataaaatgaaaatattatttattggtgatgtatttggttcaattggacgtgaaatgattgaagattatttgcatcgtattgtaaaagataatcaaattgattttgtaatagcaaatgttgaaaatacaagtcatggaaaaggtttactaaaacgccattatgatgagttatcatttcagggaattcaagccatgacaatgggaaatcatacttttgataaaaaggaattatatgactatattgatgaagcggataaattgattgtaccaatcaatcagccaaaagtactacctggagttaaatcacgggtatttaatgtaaaaggtaaattgattaggataactagcgtattaggtgttgcttttatggatagtcgtacttcaaatccatttgaagtaattgatgagtatcttgatttaccgcatgatattcatatcatagattttcatggtgaagcaacaagtgaaaaaatcgcttttgcacattatgttaaagataaggcaagtgctgttcttggaacacatactcatgtccagactgctgatgaaaagataattgatagtaaattagctttcatcagtgatgtagggatgacggggccgtatatgagcgcaattggttgcgatcttgatgcaatcgtcacaaggctaagaggttttggagcgccatttatcgtagctgaaagtagtggtcagttatctggagtaataattacttttgaggaaaatacacctgtagcgattgaacgaatcttaattaatcaagatcatccatattaggtataataattaaatgttttcatatatttttttaggaggaaaattatggaaacaattaaagtatcatcaacgtcatgccctaataatgtggctggcgctattgctagtatgattagaaatgaatctaaattacagattcaggttattggagctgctgctttaaatcaagcaattaaggcaattgcaattgctcggggttatattatcccaactggaaatgaaattgtctgtattccttcatttcatgatctaattgttgatgataaggaaatcacagcacttaggttattgttagaattacgataattttaagtaataaaaacttaacaaaaaaagtaaccctactttagatgaaaagggtttctttttttagtgttttgcgttataatagtaggcgtgatataggaggagatttattatggcaaaatgtaaattattaatgcaaactgcacaaacacaaaaattaatcgatttttttgatggatatgaagatgataaagtaaaatgtaaattcattaaaaaaactggaatcaaggctgaaattgaatgtgaaacagaacttacaccagatgaagcagctggacattgtaagagtctttttaaaaagacacctgatggagcagttttatacttctctattcaaccagatggattcttcggataataaggacgtaagtccttatttttttatttacctgttcaaattgaaaatttgaacatatagacttaagtcagttgagcatacgaagtatgcgaaataaaaaaccacctgctatgcgggtggagcaataaagaagttatacaaagatatcacctttccgatataatggagttgttcaagctgtcattataagaaaggaaaggtgattaagtatggcacaaaaaacaaattcattggcacatacgaagtggatgtgtaaatatcacatcgtcttcacaccaaagtatagacgaaaagtgatatataatcaacttagaaatgatataagagaaataataataagattatgtcaatataaaggggtggaaattatagaggggcatttgatgtcagatcatgtacacatgttggtaatgataccaccaaagttaagtgtatcatcatttatggggtatttgaaaggtaagtcagcattaatgatatttgatcgacatgcaaatttgaaatataaatatggaaatagacatttttggtcagaaggatattatgtgagtacagtaggactaaatgatcaaacagtcgcaaaatatataagggaacaagagggacatgatatagcaatggataaattgagtgtaaaagaatatcaaaatccatttgaagataaagaaatgaagaaagaaaacaaaaaagagagaagaagataacaaaaggagaaaggaggaaataaatccctttgagggatggcgagagtcaaaagcgatagcttgaacgaagagaaagcagcgccttgagacgcgagcaagcaacataggcttatagcctcagagaaaaccacgtcttttaggcgtggtttttatttacgataaaagcaagaattagatttaataaaaatgaattttttcttgtggaaataatagagatttatgtatataatatgatagaaaagtggtgaataaatgaaagattatagtaattattttaaagggccttcattaaatgaggctaaaagaagaagtcgtgacgaagttggtcgttatgatgatgcctatcatgttccaggagatatggtcaaagttggactaggaaaaaaatattatattcaaacatatgggtgtcaagcaaatgaacgtgacagtgaaactttatcaggaatattggaaagtatgtcatatcaaccgactacagaaattaaagaggctgacgtgattgttttaaatacttgtgcaattcgtgaaaatgccgaagaaaaggtatttggaaaagttggatatgtcaaaaatttaaagaagactaatccaaatctaattttcgcaatgtgtggatgtatggctcaagaagaggttgttgttaatcggatattggaaaagcatccccatgttgatttgatttttggtactcacaacatacatcgattacctgagttattaaaagatgcactttatagtaaagagatgattgttgaagtttggtctaaagagggcgatgtaattgaaaacgcaccagttagacgggacaacaagtataaagcatgggtaaatatcatgtatggatgtaataaattttgtacttattgtatcgttccttatacacgtggaaaagaacgttctcgtttagcaaaagatattatcaaagaagttgaagaactggttgctgaaggctatcaagaaataacgcttcttgggcaaaatgttaacagttatggtaaagatttaggtgaggattataatttctcaaacttacttgaggatgtcgctaaaacaaatattccacgaattcgttttacaacgagtcatccttgggattttagtgaagatatgatcaaaattattgcgaaatatgataatatcatgccggcaattcatttaccagttcaatcggggaataatgaagtattaaagttgatggggcgccgttatagtcgtgaacaatatctagaattattccataagatcaaagaatatattcctgactgcacagtcacgacagatattatcgtggggtttccaaatgaaactcatgaacaatatctagatacattgtctttatatcaagagtgtgaatatgatttagcttatacatttgtctactcacctcgggcaggaacaccagccgcgaaaatggttgataatgtagcaagtgatgaaaaagaccaacgattatataaattgaatgaaatagttaatgaaaaagcgtataagcaaaatcaacgtttcttaaataagattgtcgaagtattagttgaaggaacatctaagaaggatgattcaatgttgactgggtatactcggcatcaaaaattggtaaactttaaaggtgatcctaaagatattggaaaaattattaaagtaaaaataactgaagccaaaacatgggctttgaaaggtgaatcaattgaatcgtagtttggattgtgctaaacagttaaataaatatttattgaatcttgatgtcattaaagaatatcaaaagtatgagcagctaattcatcaggatgataagatagaaaaacttgaagcaaagatgaaagcatatcaaaagaagattgtaaatcaaaagtcaaaacaagatgaaacagttgttaaaacaattgaagaatatcaaaaaattaaagatgaatttgagaatcatccattagttgttaattatttatacttgaaggaagaagtagatagtcttttgcaatcgataaatacatatataaacggacaattattaaaataaggcttgacttaacgattgatcctaattataatttatgaaatattacacaaaacgacatagaaaaggagatagaaaatggcatatttttttgatgaaccatcacgcacatttaatgaatatcttttagtacctggatattcatctgctgagtgtcaagctaaaaatgttagcttaaagacaccattagttaaatttaaaaaaggtgaagaacctgcgttatcattaaatatccccctagtttcagcggtaatgcaagctgtatctgatgataaaatggcagtagctcttgcaagagagggtggggtttcatttatttatggatcacaaacgattgaagatcaagcagctatggttaaacgagctaaaacttataaagcaggatttgttccaagtgactctaatttaagtattagtgatacacttgcagatgtaattgctttaaaagagaaaactggacattcaacaatggcagtaactgaggatggtagtgccaatggaaaattattaggaatcgtaacaggcagagattaccgggtttctagaatggatttagatacaaaagtaactgagttcatgacaccatatgataaattaatctgtgggcacattggaattactttaaaagaagcaaatgatcttatttgggataataagttaaatgctttacctattattgatgatgatcaaaaattagcatattttgtctttagaaaagactatgaaacaagaaaatcaaacccaaacgaactattagatgattcgaaacgttatgtggtaggcgctggaatcaatactcgtgattttgccgaacgtgtaccggctttagtagaagcaggtgctgatgttttatgtattgattcatcagaaggctttacagaatggcaaaaaattacgattgactggatcagagaacattatggtgatagcgttaaagttggagctggtaatgttgttgatgcggatggttttagatttttagctgaatctggagcagattttgttaagattggtattggtggtggatcaatctgtatcactcgtgaacaaaaaggaattggtcgtgggcaagcaacggctacaattgaagttgctaaagcacgtgatgaatattttaaagaaacaggaatttatattccaatctgctctgacggtgggatcgttcatgattaccatatgacattggctttagctatgggttctgatttcatcatgttaggtagatatttctcaagatttgatgaatctccaactaataaagttagtatcaacggtcagtatatgaaggaatactggggtgaaggttctgctcgtgctcgtaactggcaacgttatgatatgggtggtgattctaaactttcttttgaagaaggagttgactcatatgtaccatatgccggtagcttaaaagataatgttggtttaactttaagtaaaatcaagtcaacaatgtgtaactgtggagccttaactattccagaattacaagagaaagcaaaaattacgcttgtttcctcaactagtattgttgaaggtggcgcacatgatgtagttttaaaagattctacatctggaaatggacatcaaaactaaaacgcgattaattcgcgtttttttgttcattttttttaatttccaacatatattaaaataggtgagaacatggcaaataatattcgtgaaatcattactcaggcagtaattgctaaagggaaaaaaagaacccttaataaatatccgttttcgattgaaggatatgacaaaattctagggtgttggattactaaccatcgttataacgcagcttttaaagatgggaaacctgttgttttgggaacttttgacgttcatctatggtacagtatcaatgatgatagtagtctattgaagcaaactgtaagctacttaaacgaattagatttagtgaaaaaagaaacccgaaattttgatgagggtgatgaattaatggttacctgtaatcgtgaaccaaaatgtattagtgtaaataagttggaagataaagttgtcattgagattgaaaaagaaatctcattaagtgttgttggtaaaacaacaatgcgagtagaaactaaagcagagaatgagacatgggatgaattagaaaatttaacagtcgatgaaaattttatcaaataaaggcggaagccttttttcttttggggttacttgtgttataatgtgatagtaattttttagaagtgaggttaattgatgaaaccaaaatatagtccaatgatgatgcaatatttatcaataaaagaagaaaatcaagattcaatcgttatgtttagattaggggatttctatgaaatgttctttgacgatgccataatggtttctaaagaattagaaattgctttaacagggaaaaatgctggagctcctgaacgggttccaatgtgtggggtacctttccattcggctagtggatatattcaaaaattagttgataatggacatcgggttgcgattgttgaacagttaacagaacctgggaaacgaggaatcgtagaacgtggggtggtacagatcattactccaggaactatctttgatgaatctctgacaaataataaaaacaattatattgctgccttagaagaatttgattttacttatactttagctttttgtgatatcacaaccggcgaatttagtgtggtcaatattgaaaagaaagagaaattattattgaatcagctagaaacaatggcagttaaggaaattgtcactttaccaaatcaaatacgtgaatttgatgatattttatcttcaccatttgcacacgataattataatgaaaagtatgataagatttttagcaaaatcaatgatttaaaacaaattaaaacagcgtcattactgcttaattatttattagatacacaaaaaagagaattggaacatttacagataattgaagaaattaataatgaagattatgtgacaatggatctttatacaaaaaaagctttagaactgacgagtagtgctaaaagtaatgataaatatggaagtctattttggcttttagatcaaactaaaacagcaatgggatcacggatgttaaaacaatggatcgaacgacctctaattaatcaagaacaaatagaagaacgtttggatatcgtagagatctttactaatcattttattcaacgagaaagtattaaagaaattctgaaagatatttacgatcttgaaagactatcttcacgaattgcttttggaaatattaatgctcgtgatctaaagtggattagcagttccttaaaagtagttccagaattaaaaaatcaattattatcgttagatgaacctttaattagtgccttggcagatcattttactgatttaagtcacattactaatttgattgatcaagcaattgttgataatccgccattaactgtaaaagaaggaaatttaatcaaggaaggatttaatgaagaacttgatgaacttcgttatatccgtgatcacggtaaacagtggttagctcaatttgagcaaaatgagcgtgataaaacaggaataaaaggattaaaagtaggatataaccgtgtctttggatattatattgaagtgactaaaggaaatctatcattagttaaagatgaatttaattatactcgtaaacaaagtttatctaatgctgaacgttttgtgacaccagaattaaaagagatggaatcaaaattacttagtgcacaagataaaatgataaaactagaatatgcattatttacagaaattagaaattacataaaaaaagatgttcatgctattcaggatgttgctaaaattattgctaaaattgatgtttttcaatcattagcaatgatttctagtgagaatagttatgttcggccaactttcaatcataataaagtgtttaaagtagttgatggtcgtcatggcgtaattgaacgggttatggcacaaggaacatatgtttcgaatgatgtaaatattgatgctgctaatccagtgatgttgattacgggacctaatatgggtggtaaatcgacttatatgcgaacgattgctttaattgcactgatgggacaaatagggtgttttgttccatgtagcgaagcttgtattccaatttttgatcaaatttttactcgaatcggggctagtgatgatttaatttccgggcagtcaacttttatggttgaaatgttagaagctaataatgctttacgctttgcaacagaaaattcattgattatttttgatgagataggtcgagggactgcaacttttgatgggatggcaattgctcaagctatgatcgagtatatcgctgcaaagattaagtgtattacattattttcaactcattatcatgaattaacattcttagaagaaaagaatcttggaattaaaaatgtccatgctagtgcttcaattgaaaatgatgatcttgtctttttataccgtatcaaaccaggacggtcaaataaatcttatggtgtcaatgttgctaaattagctaaattaccagatgcagtattaaatcgtgctaatgtactattagaagctttagaggaaaataatattgagcatcatttaagcgatgatactttaaaagaagctccaccagtaaccgtaagtgtagtggaaaaatatttagaaggtattgatccaatggcgctttcaccaattgatgctttatcaacattgattgaattaaagaaattaaatgagaagtaggtgatatatttgcaaaaaataagacagctagatgatgtattggctaataaaatcgctgctggtgaggtgattgaaagaccggcaaatgtagttaaagaactagtcgaaaatagtattgatgcaaacagtacgaagatagatgtgattattgaagaaggtggattaaacttgattcaaataattgataatggtgagggaatggtcaaagaagatgccttactatgtttttcacgtcatgctactagtaaaatcaaagatgatcaagatttgttttgcattcaaactttagggtttagaggtgaagcaattccttcgattgcttcaattagtaattttgaattgaaaacgagtacaggaggaacagggacaactgttacttatgaatatggacgctttgttgagtgtaatgaaagtgatagtaaaaaagggactaatatcaaagttgaaaaattatttcaaaatgtcccagctcgattaaaatatataaaatcgactaatgctgagtttgctaatattcaaacatatttggaacgactatctttatctcatccacacattgcttttatgttagttcataatggcagaacaatttataagaccaatggaaatggtaatttgttggaagttatctcgaacatttatggattaaatgttgccaaagcaatgattccagtggattttgaagatgatgaatttcatgtgacgggttatgtttcaaaaattgatgtgaatcgtgctagtaagaatcatatggtgacaatggtaaattcacgggtagttaaaaataaagtgagtgttgatagtattgataatgcatatcgtcgatatttagctgataaacgttatccaattgcgattgttaatattgaaatagatccttatttagtagatgttaatgtgcatccctcaaagctggaggtacgtttttctaaagaaagtcaattacgtgaattaatttatcaaggtgttagtgatgctcttgcaaaagttaatttgacttacgatgcgaccgctgaatataaaaaaactaaggcgcctttgaatttggaacaacctagtcttgatttaacttatgagtcagtacccattaaaacaatagagcaaccacgatttgaagctgattttcctcaaaatgatcaagaagttgtttttaaagacgcatctttcgatgattttacttttgttaaggaagaaactagtgaatacattatccccgatcaacaaattattgagacaaaagttgagccacgtgaaaaattaatgaaaaagaagttatttgttaaaggacaggttcatggtacatatataatttgtgaagatgaaacaggaatgtatattgttgatcagcatgctgggcaagaaagaatcaattatgagtattttttggaaaaatatcaaaatcttgatctatcaatgcgggatttattagtaccgatcacacttgaatatcctttaagtgaatttttgattattgaggaaaggaaagacttattgactaaagttggaattaatcttgaggtttttggtaatagcggttatgtaataaagcaattaccgttatggatgcaaaatattgatgagcaagtatttattgaagatatgatgatgcagttattaaatgataataaaatcgatgtcatcaaattacaagatcatgcaattgctacgcttagttgtaaagcttcattaaaagcaaatacacatttatcaaccgaggggatgcaaaatattattgataatttaatgcgttgtgataatccatacgtttgtccgcatggaagaccaacaattatatattattcaacttatgaaattgaaaagttatttaagagggtcgtgtaatggagaaagttattgttgtagttggtccaactggggttggaaaaactaggatgggcgttgctctagctaagcattttaatggcgaagtgattagcggtgattcgatgcaaatatataaaacaatggatattggaacggctaaagtaacagatgatgaaatggaaggtattgttcatcatttgattgatgttaaggaaccaactgaaagctatagtgtaaaagattttcaagatgaagttcgtttaaaaataaaagaaataatatcacgtggtaaattgccgattattgtaggtggtacaggattatatattaaagcagcactttatgattatgaatttagtgaaagtcaaaccaatcatcaagaatatgttgagaagtatcaagattattcaaatgaagagttatacaattatttaattgagattgataaagcaagtgctaaagagcttcatcctaataatcgtcaacgggtcttaagagcaattgcaatttatgaaagtacaggggtaaaaaaaagtgaaacacttgccaaacaaaatcatgaattaatttataatgctaaatttattgggctgacattagaacgtgaaagtttatatcagcggatcgatcaacgtgttgatttgatgatggagcagggattgcttcaagaaatagatggcttaatgaaaaagaattatacccgtgaaatgcaaagcatgaaagcaatcgggtacaaggaatggtttgcttattatcagggaactcaaacacttgatgaaactttggagttgataaaaaagaattctcgtaattatgcaaagcgtcaatatacttggtttaataatcaagttccggttatttggtttaatgtgaatctaaataattttaatgagacgattaatgcagttatcagtgaattagaagggtaattatacccttttattgtttatgcaactgttagttgacagattgcctagccgtagtttattgtgatttggaataaaaaaactataatcatggttgtcaggaggaagaaataaatgatgtttaatgacaacttaaataaatatcgaaaacaaaagggattgtcgcaagaggaattagcttttcggttaggagtatcgagacaatcggtaagtaagtgggaatcaggtcaatctacacctgaattagaacgaataattgaaattgctgatctatttggtatatctttagatgaattaattggacatgaaagtaatgattatgttacagttgaccgtgaagaattgagaagtgtagtgcgtcatctctttacttatgaatataagagtaaatttaaaattggaaatgttccattaattcatattaatttaggtcgtggttttagaattgcgaaaggaattattgcaattggcaatattgcggtagggctttttagttttggggctttagcacttggtgtatttagtcttggcggtctggcaattggtttattgacattagcaggaattgctatagggggaattagcttaggagggctaagtattggctattttgctgtaggtggaatggcaataggaatctatgcaattggaggtatggcaattgcctccaaactcgcaattgggggtatggctcatggttatgttgcaattggaagttctgcaaatggtgttcatacattagttagcactaattgttcactagaaatgattagtaattttatcttgcgacagcataatctaaatgctaaaatagttgaatttttattactctttatatattaaaagccgtctgaaaacagacgacttttttattcatcataaatattaacaatttctccatttaaaattcgattcatattttttatagcacagaaattaccgcacatactgcaagtatcttctttttcaggttttgcttgttggcggtatgtacgtgcttttttaggatcaatggctaattcaaacattttttcccagtctaaattttttctggcacaactcatttggtagtccaaatcttttgcccctttgatacctttcgcaatatcggcagcatgtgctgcaattttagatgcgatgattccttctttaacatcatttagatcagggagacgaagatgttcagcaggagttacataacatagaaaagcagcaccattagcggcagccaatgcaccgccaattgcagctgtgatatggtcataacctggggcaatatcagtaactagtggaccaagaacataaaaaggggctccctggcaaatggtttgttgaatttttatattagcttcgatttgatttaaagccatgtgacctggaccctcaacaattacttgaacatctttttgccatgcacgttttgtaagttctcccaaagtcaccaattcttcaatttgacttatatcgccagcatcttcgattgaaccaggacggcaagcatcacctaagcttattgttacatcatatttttgacaaatatcaaggatttcatcatagtattcataaaaaggattttcttgaccagtcatttccatccaagcaaaaataattgaaccgcctcgggaaacgatattagtaagacgcttattttctttaaaacgttgagctgtatttttattaattcctacatgaattgtcataaaatctactccgtcgcgagcatgcatctcaacaatatcgatccattgtcgagcagtaatttcttttaagggcttatgataataaactacagcatcgtagattggcactgttccaattattgcgggacattctttggttaatttgcgacggaatttttgagtatcgccatatgaacttaaatccattattgattcaactcccatattgacagcatcattagcttttttaagttccatatctaaatctttccagtctctagaagttccaagatttacattaatttttgttttaagcattgaaccaatcccatttacattaatacaggtatgatacttattggctgggataacaacttttccttgggctattagtgtcttcaattcttcaatattcattttctctttagccgcaacaattttcatttcaggagtaatgattcccttttttgctgcattcatttgtgttgtgtaattcattttttatctccattcttttttgtatagaaaaaggtttggaccaaaataggttcaaaccgaacataaacaaaaatagtggctagatccctacgttggcattacccaaatcaggttatacaggtcgaagttagattacttcctctcagcccgcatacgagctccctttctatataaataagtctacctttactgcacgcaaatgtcaatttttattacttattttgttgatttagtttttttatatcactggtacgcccgtgtttcaaaattcttcgataattctcagctaaagctttttcataattactggtcatccatggtacatagaactgtgtatttcctagttcttttggaagatactgaatatattcccacaattctggccgactataatcatacttttcatcatcttctaaaccaaccggcgtaagacgtaagtaagaaggggtttttaaagaacgttcatttagtgaagttaacgcagcatcaattgcattttcactagattttgattttggtgataaacataaatcgataattgcactagcaataggaattcgagcttctggaaaaccgattgttttagcggcttgcatagcaattaccgtacgcatacacgcatttggattggctaaaccaatatcttcataagcagttgtgataagtcgccgttctaaagattcaatatcttttgattcaatcagtttagcaaaataatacatagcaccattaggatcactaccacggattgatttttgcaaaccacttaatgtatcgtagtaattatcttcgtccttatcatagacaacattagttttaatagcagcagttttcaaatcagcttgagtaatatgattattttcacaaacaattgtacaaatttctaaacagttataaccatagcgaatatcgccactacataattttgcaatactatgcaatgcttctttttcaatcgtatatttgttgtttaaaccatttggtgaagtcattgccttatttaaaccagctacaatttcatcaacagttaaaggtctaacttcgagaatatgacaacgagaacgaatcgctggattaattgaatgaaatgggttggctgtagtacatccagcgactattaataatccactttccatgtgtgaaagaagatcatcttggcgcgctttattaagtcgatgaacttcatcaatgattacaaaaagactaccacttaacttagcttcttcaataattgcatccatttcttttttatttccggttgaagcgttgaagatgcgatatggaatgtcaagatcatttgcaagggccattgcaattgttgttttgccacagccggggctaccgtataaaataattgaaaatggatgacttttttgaacaaatttagttaaaatagcatttggtccaactaaatgttgttgtccgattatatcttttaaattttgaggtcgcattctattggcaagggttgatgacatattatcttcctttcgtttttaaaatcagttataataattataacatttttaaagattgaaagataggtggattaaaatgagattagttgtacagaaagttagtcaaagtagtgttaagattgaaggagaaattgtaggagctattgataaaggatatatggttttagttgggataactaatggcgatgacgagttattagttgaaaagatggttgataaattagtgaatttgagaatatttgaagatgaaaatgataaattaaatctatctttattagatgtaggaggaagtgttttatcaatttcacagttcacattatatgctaattgtaaaaaaggacgaagaccaagttttattgatgctgctaaaccagatatttctagtccgctttatgatttttttaataaaaagttagaagaaaagggaattaatgtggaacgaggagtatttggagcaatgatggaggtatcgttgattaatgatgggccagtgacaattatcttagatagtaatgagttattttattaacaaattgagtaaacttattgattttatatttttttacaaaaaaagacaaaaaaggctttacaagacaaaagggatatggtaaattaaataggcactcgaggaaagggacgtaaggaccggagagaaaaagcaaaaaaagttaaaaaaaagattgactaaaaagcgaaaagagtgtaagatattcaagtcggcaaaagaagccggagagatcattgaaaactaaacagaattaagaaacacacgtcaatatccagaaggataaaaaagaaaaaagagctaaacaaacgaagagttgtttaaataaacaatggagagtttgatcctggctcaggatgaacgctggcggcgtgcctaatacatgcaagtcgaacgcgagcacttgtgctcgagtggcgaacgggtgagtaatacataagtaacctgccctagacagggggataactattggaaacgatagctaagaccgcataggtacggacactgcatggtgaccgtattaaaagtgcctcaaagcactggtagaggatggacttatggcgcattagctggttggcggggtaacggcccaccaaggcgacgatgcgtagccgacctgagagggtgaccggccacactgggactgagacacggcccagactcctacgggaggcagcagtagggaattttcggcaatgggggaaaccctgaccgagcaacgccgcgtgaaggaagaaggttttcggattgtaaacttctgttataaaggaagaacggcggctacaggaaatggtagccgagtgacggtactttattagaaagccacggctaactacgtgccagcagccgcggtaatacgtaggtggcaagcgttatccggaattattgggcgtaaagagggagcaggcggcagcaagggtctgtggtgaaagcctgaagcttaacttcagtaagccatagaaaccaggcagctagagtgcaggagaggatcgtggaattccatgtgtagcggtgaaatgcgtagatatatggaggaacaccagtggcgaaggcgacgatctggcctgcaactgacgctcagtcccgaaagcgtggggagcaaataggattagataccctagtagtccacgccgtaaacgatgagtactaagtgttggatgtcaaagttcagtgctgcagttaacgcaataagtactccgcctgagtagtacgttcgcaagaatgaaactcaaaggaattgacgggggcccgcacaagcggtggagcatgtggtttaattcgaagcaacgcgaagaaccttaccaggtcttgacatactcataaaggctccagagatggagagatagctatatgagatacaggtggtgcatggttgtcgtcagctcgtgtcgtgagatgttgggttaagtcccgcaacgagcgcaacccttatcgttagttaccatcattaagttggggactctagcgagactgccagtgacaagctggaggaaggcggggatgacgtcaaatcatcatgccccttatgacctgggctacacacgtgctacaatggatggtgcagagggaagcgaagccgcgaggtgaagcaaaacccataaaaccattctcagttcggattgtagtctgcaactcgactacatgaagttggaatcgctagtaatcgcgaatcagcatgtcgcggtgaatacgttctcgggccttgtacacaccgcccgtcacaccacgagagttgataacacccgaagccggtggcctaaccgcaaggaaggagctgtctaaggtgggattgatgattggggtgaagtcgtaacaaggtatccctacgggaacgtggggatggatcacctcctttctaaggagaaacgcatgatcgaagatgatgcacaagagaagtgatgtttcgaagatactgtttagttttgagtgatactcaggtatgactcagagatcattgaaaactggataatagaaaataaattgcgatagaaatagaaaatgagatcgaaatagtaattgttattattgaggtctttctagaaaagtcgaaaactaagaattttcatcactaaaaaacataaatcgaaacggatggatggattttagtaaatagttgaaaatagtaatcaagcaaacaccaaaataggtaaagtaagaaagagcgtatggcggatgcctaggcacagagaggcgaagaaggacgcagcaaacagcgaaatgcgacggttagcagtaagcatgcaacgatccgtcgatgtccgaatgggggaacccacctggagtagagaccaggtatcctgaagtgaataaatagcttcagagaggcgagactcagggaactgaaacatctaagtacctgaaggaagagaaaataaacgaatgattccctaagtagcggcgagcgaaaggggaagagcccaaaccgatcttaggatcggggttgtaggactgtcggcaaagagcaagaaatcattataggcgaacggaatgggaagtccggcgaaacagggtgacagccccgtagccgaaatagtgaagaagcacgagacagcacctgagtacggcgggacacgaggaatcctgtcggaatccaccaggaccatctggtaaggctaaatactcctctgtgaccgatagtgaaccagtaccgtgagggaaaggtgaaaagaaccccgggaggggagtgaaatagaacctgaaaccatatgcttacaagaagttagagcccgttaaagggtgatagcgtgccttttgtagaatgaaccggcgagttacgatatggagcgaggttaagcaggatatgcggagccgaagcgaaagcgagtcttaacagggcgaaagttgcatgtcgtagacccgaaaccgagtgatctagccatgaccaggttgaagttggggtaaaacccgatggaggaccgaaccgacccccgttgaaacgttggcggatgagttgtggctaggggtgaaattccaatcgaactcggagatagctggttctccccgaaatagctttagggctagcgtcgaggtaaagtcgtgtgaaggtagagcactgaatatgtgatggccccatctcggggtactgaacataatcaaactccgaatgtcacaaagatatactcggcagtcagacagtgggtgataaggtccattgtcaaaagggaaacagcccagaccatcagctaaggtcccaaaatatatactaagtggaaaaggatgtggagatgtccagacaactaggaggttggctcagaagcagccatcctttaaagagtgcgtaacagctcactagtcgaatgactctgcgccgataatttaccggggctaagtatattaccgaagctatggatttacgcgtaagcgtgagtggtaggggagcgttctatgtgcggagaagcggtaccgtaaggagccgtggagcgcatagaagagagaatgccggtgtgagtagcgaaacgtgggtgagaatcccacgcaccgaaaacccaaggtttccagaggaaggttcgtccgctctgggtaagtcgggacctaaggcgaggccgagaggcgtagtcgatggacaacaggtagagattcctgtacttacggtatgaatgatggagtgacggagaaggctagcggatcctgctgatggaaatgcaggtgcaagcgaggtagccgacagccaggcaaatccggctgtcgaaaggcaaaggcgtgaggcgtatggaaagctgcggcaagtacagaagtccgtgaagccagcttccaagaaaagcttctagtgataatcatacagtaacccgtaccgaaaatggacacacatgggtgaggagagaatcctaaggtgagcgagagaactatagctaaggaactctgcaaaatgactccgtaacttagggataaggagtgctcatagagatatgagccgcagtgaaacggcccaagcgactgtttaccaaaaacacagctctatgctaagtcgaaagacgacgtatatggggtgacgcctgcccggtgctggaaggttaagaggatgtgtcagcgcaagcgaagcattgaattgaagccccagtaaacggcggccgtaactataacggtcctaaggtagcgaaattccttgtcaggtaagttctgacccgcacgaaaggcgtaacgatttgggcgctgtctcagctgtagactcggtgaagtcttagtacctgtgaagatgcaggttacccgcgactagacggaaagaccccatggagctttactgtagcttgatattggactttgatgcaagatgtacaggataggtaggagactgagagacatgcacgccagtgtgtgaggagtcaatgttgggatactactcttcttgtattggagttctaaccggatgccatggaactggcaacgggacagtgtcaggtgggcagtttgactggggcggtcgcctcccaaagagtaacggaggcgcccaaagataccctcagcttggatggaaatcaagcgcagagtgcaaaggcataagggtgtttgactgcgagacctacaagtcgagcagggacgaaagtcgggcttagtgatccggcggtgctgaatggaaaggccgtcgctcaacggataaaagctaccctggggataacaggctgatctcccccaagagttcacatcgacggggaggtttggcacctcgatgtcggctcatcgcatcctggagctgaagtcggttccaagggttgggctgttcgcccattaaagcggtacgcgagctgggttcagaacgtcgtgagacagttcggtccctatctgtcgtgggcgtaggaagtttgagaagatctgtcctcagtacgagaggaccgggatggacatatcaatggtgcaccagttgtcacgccagtggcacagctgggtagctaaatatggaagggataaacgctgaaggcatctaagtgtgaaacccacttcaagatgagacttcccattacgcaagtaagtaagaccccttaaagacgataaggttgataggtcaggagtgtaagcatggcgacatgttcagcggactgatactaataggtcgaggacttaacctagagaaaaagggttaaggcttgaaactgaaagaagacaaagtggaagacaaaagacgcaagaaaactattatctagttttgagtgattctcgaaaggaattgcttagaaaagaagatctggtagcgatagcatgatggacacacctgttcccataccgaacacagaagttaagcatcataacggcgaagatagtaccaaggtgcgacaatagcaagctgccggttctttttttatttacggatacctctgcgtatcctttttttattttatatccggctttaataatgaattctaagatgggaatatttagaaaaaaagaaggtcactttatttgaccttcgatttttatgttttatatttcaactgcttctttaactaatgcaactacttcttccatagttccacagttaatagctttagcagctaattcattcatttcagattttttcattgatctgattaactttctttgagaaagaatagatgtagcagacatagagaattcatctagtcctaaaccgattagtagtggtgcagcaattgcttctccagccatttctccacacatacctgtccatttaccttcggcatgggctgaatcaattacatgtttaactaaacgtaagattgatgggtggaatggttgatataaataagaaaccccagatgacattctatcagcagcaaatgtgtattgaactaaatcgtttgtaccaattgagaagaaatcaacttctttggcaaattgatcagctaacactgctgcagctggaatttcaatcatgatacctacttgtaatgtatcagatacttcgattccttcactaattaatttttctttttcttccattaagattcctttagcttttctaaattcatctaaagtagcaatcattgggaacataattcttaaatcaccatatactgaagctctaagtaatgctcttaattgaactctaaagatgtcttctctttggaaacataaacgaaccgctctaactcctaagaatggattcatctctttaggtaaatcaattgcttcgatttctttatctccaccaatatctaaagtacgaacaacagcaggttttccttctaatccttcaagaacctctttataaacattaaattgttcttcttcagttggtaattgagcagattccatatataagaattcagttctgaataacccaactccttcaccaccattgtctagtacaccttggatgtcttttggagatccaatattagcaactagttcgacgtgatgatcatctagagtaacagatttttcatttttcattttctttaattcttccttgtatgcgatgaatgcttcacgtttagcttgatattctttaatttcatcatcactaggattaataattacaataccagcttcaccatctaaaacaaccatatcagcatcattagtttcatcagttattgttttacaagaaacaaccgcaggaatttctaatgaacgcgccatgattgctgagtgagaagttctaccaccaatattagtagcaaatcctctaactaagtttttatttaattgcgcagtatcagatggagttaagtcatcagcaataataacaacttcttcatcgattaaagcaggatttggcaatgacttacctagtaagttagctaataaacgacgagatacgtccttgatatcagccgctctttctctaaaataatcatcatccatactttcaaacattgcaataaaagtattagcaacttcatctagagcagcatcagcgttaatcttttcatttctgattttatcctctacttgagtttttaattcaggatcttgtaatactaatgcatgagcatcaaatacagcagcttcttctgcagataaatttttagcagcagcttccttaattgattctaattcttttgcagtttgtgacattgcatcgtcaaattttttgatttctgcctcagcatcttctactgttacttttgtcactgttaaatccggcattactagtttgtatgctttagcaatcgcgataccactagatgccccaataccttttatcatattaaaaacacctccatatacattcctattttaccttatttttagcaaaaaataaagaaatatcgaactgtgactaggtattttcgcgttatgaaaaaagggctttcaaaagggacttacaaattaatagactttgacaaaaaatacatgactcgtttttttcgagttttgaaaaatgattgatatttccggcctttaacttgaagttttaaggtaaaaatagtatcatataagtggagggacacaaaatgaaattaattatagttgaaaattatgaagaagcaagcattgaagctgcaaaagttatgttagaagttgttaaaaacaatccaactgctaatttgggattggctacgggatctacaccaatcagaatgtatgaattgatgatcgaagatcacaagaagaacgggacttcttataaagatatcaaatcatttaacttagatgaatattttggattagaagctactcatccacaaagttatcattattttatgaataaacatttattctctggaattgacattaatcctgaaaatgtacatgtaccaaatggtgctggagatattcaagtaagttgtgatgattacaataaattattagctgaaaatcctatcgatatccaattgttaggaattggttcaaatggacatattggttttaatgaaccaggaacttcttttgattcagtaactcatatgattgaattaaaagaaagtacacgtcaagataatgcccgtttattctttgatgggaaaattgatgaagtacctactcatgcgattactatgggaatttcaaatattttacaagctaaaaaagtattattagttgcgtgtggtgaaaataaagctcaaccaatcaaagtattggttgaaggtgaaaaaactacagacgtaccagcaagtgcacttcaagatcataatgatgttgttgtaattgttgataaagcagctgctagtttattaactaaataataaaaggaaagatttataaatctttccttttttaaaaccttttttttacctttaaagaaatgtgtttaatttgtttacgtaagataaataacgtataattattatatgggggtactaaatatgacaaaaaatttatttaaagaagtagcgatgaatgaaacaaatccaaactactcaaaagcaatatcaagacttgaaccattgtatcaaagaagtaatgatctacgtagtgagtttggtcgtgattatacgagaattatcttttctcaggcataccgacgtttaaaacataagacacaggtgttttttgcagttaaggatgatcatgtttgtacacgtagtgaacatgttaacttagttgaatctgtaagttatacaattgcaaattacttaggtttgaatactgaattaactaaagcaatagcagtaggccatgatttaggacatgccccatttggtcatggtggtgaacgtattattaacgagcttgctaaaatacatgggctcgattctttttggcatgagcgcaatagtcttcatctcattgatgaaatagaaacattagaagataatgaacatcatcgccataatttaaatttgacatatgctattcgtgatggaattatttctcattgtggagaaatgaatcaaatgagtattaaaaagcgagatgagtatattgatttacaaaattatactagcccaggacaatacaatccttatacttgggaaggatgtgttgtaaaaatggcagataagattgcctatttagcacgtgatattgaagacgctttacgtctcaaggtactaaaagagaataaagttgaagtcttgaaagcttcgctcaataatattactagtgaatatcattttacagcaatcaataatggaactgtcgttaattattttattcaagatgtatgcagtcatagtaatccaagcgatggaatttcattatcaaaagaagcttttgaaataatgaaaacaattatgaagtttaattatcaaaatatatatttaattgatagagtacaaattcatactaattatgttaaattgattttaaattctatttttgatttctttattaaatacgatttaatggctcgagatagtaatactaatattattgatgaaatttctaaggataaagatcaatttccccatgcaatcaatggatttatccattggcttgaaaaatatagtgtgatgaatggagcaaaacgtgattcgctttatcaaaataaagttatttatgattttattaatgatgataaagcaattattaaaagcattttagattatttatcaggaatgtcagatgcctatattattcaaatatttaatgagcttatttcattttaatccattgaagaaattcaatggatttattatttttacttaaattattagaatagatgtggtaaactaatcattattagggaggtttaaatatgcctattaaaataccaaatgatttaccagcaagtaaaatattaaaagaagaaaatatctttgtgatggatgaaaatcgtgctttagctcaacaaattaggccattgcaattattaattttaaatattatgccgactaaagtagtaactgaaacacagcttttaaggatgctgtcgaatacaccacttcaaatcgaggtagactggattcatatggccagtcatgaatctaaaaacacacctcaagaacacttattagctttttataagacatttgaggaaataaaagataataaatatgatggtttgattattactggagcaccggtggaaaaacttaggtttgaagatgttgattactggttagagatggaaaagattttagaatggtcaaaaactcatgtatttagctcattttttatttgttgggcttctcaagcagcattgcattatttttatggtattgagaaacatgaattaaaagaaaaactgacaggtgtttattttcatcatactaatgttgataaaatgaagcgaaagatacttagaggctttgattatcaattttatgctcctcattcacgttatacaacaattatggcagaagatatagcaacgatttctagtcttgatattttagctgctagcgatgaagcaggggtttatttgattgcagaaaaagatggctcacgtttttttgtaactggtcatcctgagtatgatcctgatacattagataaagaatataatcgtgatctggcaatttctgatcaagctactatgcctaaaaattattataaaaatgatgatatgcacaatgaaattttagtaaaatggcgttctcatgcttatttattatttagtaattggttaaattattacgtttatcaagaaactccatatgatttaaatgagttagaaagtttaaaactaggtaaataatgtaatattgtatttacgataagtttaaaagttgaagaaataaatcttgctcaaattaagtaaatcttctaagttggaccagcaaatgatatgtatcaagaattctagacacatatcatttttggtccaatttttagaatcggtacaatttgagtaatcagtaaatttatatataatttctaaataatgcagtagaattaagtttctatttcttttaagagtttactttgagtttgtctgtatcttagtggtgtaaggcccattgtttttttgaatattttatcaaaatattcaatattattaaatccacattcaaaagctatatttagaattgataattcagtagataaaaggagttctattgccttatctatttttttttatttaaatattggctaggagtcatatttaaatattcatgaaattttttaattgtatattgtttagaatatggtgagatgataaaaatatcttttgtttctttaattttatttaaatcttgtatttctaataataatgatttaaaccaatttggatatatattcgtatcttttgattgatgatagattaattcttttatcatttgatataagaacaattctatatctttatttaactcataataagaatcgttgagattgatatcattatagtaattaattagttttctagatttttcatcagataagtgtcctattacagtatcattaattaaatgaagacctccaaatatagtctgaactctattcataattttgtcagaaaaagctaaattgatatattttaaggaaatattttcattaatagtaacaagttcatgaaaaatattttttttcattaaaataatgtcatttcttttaataatattagatgttgatgttgtatcatttttgatttcaccatcaataattaatgttatttcataatatgtctgataatgttttcctacttcagatttttttctttttcggtgttgccagtgaatatctttgctgttattgatgatttctagacttagttcttgcataaagcacctccattatttttattatattataattttgatttaaataaaattaaaaataaagttagaaaaataagataaaatgaatgctttgtttaataaagtttaaaaagcgaatatatgttaagtatgatataccttgttatgatactctttatatgaaaaggaggtagacaaatgaatgaaattcaatatttaaaagagtttacgagattgtataaagaaaatagtcatgataaatacaatcgggaagtagaatgccatttctttatgcacaaggaaaatcgtacaaaaataacgagcgatgattatttcttatcatgttttcctagtgcaatttgtggttttggatcaagaaatactaactttatttacaattgcaaattagaacgattagcaaaattaatcgaaggtacacatgatgttgaaaaagaagaattagaagaattgtatacgttttgggctgatgagaatgataaagaacgtcttagaagatattatccaaatgatataaaagaattaatgccatatgatgattttgaaaatgattattatacagcgtatcctttatatagattaggaggagcttatcttgattttgaaaaattatttgatttaggaatagatggattgattcatgaaattgattctcaaccactcaatagttttttaagagcttgtaagaaatcgcttatttacttaaaagaattaataaaactgtatcgtgatgatgccatggacattaatcctgaattggcttatacgttaaatgaattacttgaacatagaccacaaaatatgaaagaagcgattcaattaatgtggatttatgtaggcgttagtgaaattagaaactatggaagaatggataatcaattagcacgttttttagatgatgaacaagatgcatataagaatattgcagaatatttcaaggtaattagacaacgaaatacgatttacaatggtcgtattattttaggtggagagggtcgtcatgatcttgaaaaagcaaacaagatatgcagtatagctcttaaagttatgaaagatttacatttaactgaaccacaattaacacttaggtggtcaaaagatatgcctgatagtatttttgataatgcgattgattgtatagaaagtggttgtagttatccattattatacaatgacacggttaatattaaaaatgtcaaagaatcaatgaatgtatcatataaagaagcggttgattatgttcctcttggttgtggtgaatatgttttggatcataaaagcattggttcacctaatggaatcattaatttagctaaggtattagaggggttggttaatgatggaaaatgtatgattactaataaaaaaatagtaaagcattatttaactaaagaacctaatacatttgaagaattatatgatgtatataaacaagagttagattatcaaattgatttgttagctaaacaagagaaatttgaatatgattatatgaataatcattgtggatacttatttaattctattctttatgataactgtattgatagaggtaaaagcttattaaatggtgggattgactatctaggtggaactttggaaacctatggtaatgtgaatagcggagatagtttatatgccataaaaaaattagtctttgatgataaagaaattcgttataaagatatggttgatgcaattagaaataactttattggatatgaagagattagagaaaaatgccttaatgttatcaagtatggtaatgataatcctgaagtagatgaaatgattaatgaattaaatcagtatgttgcagtcacaacaaaatctaaatcagaaaaatatggattatcttcatatttgatagttattataaataatgatgcaaattcacgattgggatatagaacagcagcaacttttgatggaagaaaagcttatgaaccgttagcaaatgcattaactcctcaaagtggtgctgaaaaaaatggtgtaactgctgtattgaatacagtgagtagcttagatgtcaataatatggcaggtgctgtctataatctaaaattaagtcatgatttgatgaatcaacataaagatatggttaaagagttattaaaaatttacttttcatctggtggctcacaaattatgataagtgttattaaccaagaagaattaaaagacgcgatgatacatccagaaaaatatcctaatttaattgttagagttgggggattcagtgctagatttattgatttatcacccttggtccaaaaagaaatcgtaagtaggatggtatattaatttgaaaacttgtacaattgttaatattgacagatgttcattaaatgatggtccaggtatcaggacagttatattttttaaagggtgttgtttaagatgtatatggtgccataatcctgaaacatatcgttttgatatacaggaatatgaagaggatggtagaaaaaaaacatatggtaagatagttgagactgatgaaattaaaaggattattttgaaagatatgaaatattatcataagacaaatggcggtgtgactctttcaggaggagaagcacttttacagattgatgctgcatatgaattagcaaaattttgtaaagacgagaaaataagcttatgtgttgagacaagtggtgcagtgccgttagagtatataaaaaaaatagaggaatatgttgattactggctgtatgattataaattaagtgatcaagaaaaatattatgattatcttaaaacaaattcttccttaatcttagataatttaaaatatttaatcgataataaaagacatataattttaaggtgtccaatcatccataaaattaatgataatatggaccattttcaagcaataagtcattattctaagtatgtatctagtatagagattcttccatatcataatttagggaaagcaaaagctgaaaacatcaatctagatagttacttttatcaagaaaatacatcagaagaattaaaagaactgtggaaaaaacagttgagtgaattaggatgtttaaactttaaaatacattaaaaggagagaataatatgaataattttattgataagtttgttgagaaaagttcaaaacttgctaatcaaatacatctaagatcaatgcgtgattctgttgccttaacaatgccattagctattttagctggcattatggtattgttaaatagtttgattttggatccaaatggagtgttatcaagtattataaatacaaataccttagttaaagcacaagaagttggaacacatgtaacaaatggaacattaggtatttgggcagttgcttcaacagttggtgttgcttactgtttatcaaaaaataagggtgctgaagaaccattgattccaggatttgttgcactatgtagttttgtgactttagttcctttgacaactagtgtaacaccacttggaggaagcgaagcagtaggaatagctaatatattagctcaaacatacacaggtgtatctgggatgtttactggcttagttgttggaattacagccactgagctattcttagtaatttcaaaaattaaagctttaagaattaaaatgccagagtcagtaccacctatggtggcaaagtcttttgataatatgattccatttatgttggtagtggtattctatgcagtattgtcatttgtattagattgtttctttggacaatcatttaatgaattagttgtaaatattattcaacagccaattaaaggattaactactagtttaccaggattcttgattgcaatggctattttcaatttattgtttgcaataggtattcacccttcagcaattgtagatacagttattggacctggtttattactagcaattacagaaaatatggatgccgttcaagcaggattgccagctcaaaatattattaatgattcgtttaaacaagtttatggtttaatcggtggaactggttgtacaatttgtttaattattgcagtatttgcattctctaaacgtagagatcataaaatgattgcaagtttaggtgtggcaccaggaattttcaatattaatgaaccagttatctttggatttccaattgtaatgaacccaattatgattataccgtttgtattagtaacacaaataaattttattttagcttatattgttacatcattaggtttgattgaaaaatgtgttgttcaaattccatggacaactcctccagtaatatcagcatttttgtcaactaatggagatattagagcggctgttttccatattatattgattgttattggggtaatgatttatttaccatttttaaaaatgtcagaaaaatcactaaataaccaaattgaagaaaattaaataagaggggtataaccctcgctttatccaaaattattaataatataactacatattaatgttgtagagaacatggagaagattatgaataaattaccagataatttcttttggggcggttcagttactagttttcaaactgaaggagcagcttatgaagatggaaaaggattaagtatgtatgatttacataaaagggaaaatggagaacctaaatgggatcatgggattgatttttatcatcgttacaaagaagatattgctatgatggaagaattaggtcttaacttttatcgtttttctttatgctgggcaagaatccaaccagatggtgaaactaagataaatgaaaaaggaattgcctactataataatgttattgatgaattactagctcacggaataacgccaatgataacgctagatcattatgatatacctttgccattaaaagaaaaatacaatggatttttttctagaagagtagtcaatgcttttgaaaagtttacagagatatgtgtaaaggcttttggtgatcgcgttaaatattggatgacttttaatgaacaaaatgattatgcaaaagaaactacaaaagcgggagcgactgtagtgccagtaggaatgagctattctaaatttttatatcaagtaaatcataatattttaattgcacattgtaaggcaattaagatgattagaaaatattatgatgacgctaaaatttgtggaatgattgcactaacgaatttttatccaaatgataaaacaccagagaactcaatgttttgtatgttagcagatttatacactcatcaatttcatgggtatgtttttactaaagggagatatccagaatacatgattagatattttaaaaatcatcattgtatgccagaatttgaagagggtgatgaagaactattgaaatatacagttgattttttaggagtatcatattatcgttcttacactcttacaacaggtgattttgaagaagacaagccgttctacgatgttattgaaaagaatattgtcagaaatgaaaatttagatataactaattggggatgggaagttgatcctgtgggattacgtaataacttaactaatttgtatactagatatgagttaccattattaattttagaaaatggttatagtcatctagaagatttatgcgataataatgagattaatgatgattatcgtataaaattccatcatgatcatttagttgaaatgaaaaaagcaattgagctagatggtgtagattgttttgggtatattacttggggtccatttgatatgttaagtagttctggagatatgaataagagatatggttttatttttgttaatcgtacaaacgatgatttgcgagatatgaaacgatttaagaaaaagtcatttgcatatatgaaaaaagtatataaaagcaacggtgaagaaatataacaagaggtgaagttaaaagttgtaaaaggaaacaatgagcaaaaacatgaaaaaagtaaatactaaacgtaatgagtttagaatagataacaccgatgttaaaacgatggatcaatctgaaaaatcctcacagtggtagttgttatgataaaacaagaaataaatggtatgtaaaaatcacacttaaaaagaaaatctataacttaggcagatatgatactttggtacatttacccataaaaagtagaaaattatattttcaatgtatcggcaaactgtactgttgttcggacttggtctgccttttctaaaaaaaatttcagtagaaaaggctatcgttatgataaccggtatttacagataatgtatatcttctttttctatagtgttttttattctggttctgataaaggtaattggtttgtacaaatccctgtcatagcgctgattgaatgaaacaatatgtctgcgatgcaataggtgtattgaacatatccacaaaaaaagtttatatatatttgcaggttttcgattccaaaaactataagaagggatataaagatactttttattaatcctgtttcatatctgatgagatatcctaaaggtataaacataatcagatgacatacagaatattcagtttgatatagaagtctatagtatgggttatagaatgttatcatatttctgatgtctttagtaaaattataattatcaccgggatctatcactactggaaaaaacaacacacaaaacagtaaagaaacatatgtggtggcagcaaaactccagacaatagagtatttttgtctctgaaaaaaataactgttagcaaaattacgcctattacaaacagcctataggggaatacaataatgttattcccgctataggcataaaatttaagcaaatcagtcaacagtaacattaatttccatatataacacgtaatgttgcagaaacgtatacattattatagtagtccgcttttgaacttgtgatacggatttcataattgcctgcagggaagtcaccccagcttacatactgaccagactgcaaaggtacagatttaatcttaccagttctgtttccattgtgaaataattcaaatgatatggtttcgtttgggaatgaagtggtagaatttataaatatgctaattccaccgtttgacatgacatattctttaggtgttaatttataattgctaaaactaacattataagttacagaattagctgttaatccttcagactcctgcgtgatgggctgtgtctccattgcaaataaatttgatgatgacattaatgccatcaaaggaactaaacataggcgtaatatttttttcattttgttcccctctatttttgcttatattatagactataaaaataattactgatataaaatatcaagataaagttaattttatatgttctttatgtaatatttttataactgaaagatataaagtaaaaaattatcttttatcatcacatataaaaatgatgtcagagcatcaggatattaaagataagtgctattttatattatacctatgaagaagtttttaatgaaaaagatgtattaaattgaaatagtgtgtatgtatatggaacaagttccatatgtctaagagtattgcgtgatctgcgaaaaagcaaggtaatacaagtctccactttgctttttctcttgctcactcactggtagaaggtaaggcagggatattatttgattagtatgctactcaaaaaattataaaaatgtggaaagaaaaaaatattaggactgttattaaattagataatgctttagaaaattttcaagttttgtttgcttataactctaattataagatcacacaagaattgttgtaaagaaatagaatctaccactttaagaaataaatgcaaaatcataaattttttaagtatgtcagaattgcagaagtttgtgggtagccaattttagaactggtctgataggattgcttcgcatgacaagatcttttttgtaaatgagtctgtaacaacccagtatctgattgattaaattttgctgtttcatattaaggtagattctaaatttaatccccttttgccattgagatatttttggttttcaatgtattgtttaatgacttgtgagggagcatcactcaccgtagatgcaaaatagctgttcgtccatcttcaattacttgcgtaaattcgatggacatgtcttatactcccatagttaaagcaagagagacaacacatttgataaatagcagtataaaagagaaatagtttaaacttaatcagtttttacatcaacttcagtatcttttgtatcatttaaattattatacttgtttacagctatgatacattttggcagtagaataactaataatattaaaaccacaacaattaaaacactttttagagtttctagaaatgcatacgaattcatataggctataccgtccatactataatatcctccttagatttattattttatatctcaatattatttatcatattataattacggatgttgcttttatagtaaaaatatgtaattttatggaaaaatcaattacaatataccaggagaaagataatttttgctatattctctctggacaaataatagcttgaaaaactttgaaagaggatattttatatcttcctagactattgataaagtacatcatgtatcaaatcaatagttttttatttgcataggaaagagagtatgataaaataaaaaggcaagaagatgatttcgtcctagtttgcaaaatttgaaactctttttgctttttatatataaaggaaaattgaaaaaaaatggcataattaagatgtagattagagtggtaaaatatggtaatgacaagacggagtatcaaaaagacaatatcataatgagtataatagaagagttagtaccgtaggaacataatgtaagtaaactagatttatacatagattgggattttataaaaagatctatacattgattttggtcgatcggacatagatttagtgttactttttaaaatggtatttatcggttgctttcttcatccatatatgaaaattcctcctgtattcttcaaaatggaatgatgttacagttagataacgttccatcatttaaaaaaaagattcaaaagaaatatccaaaaatgtgtgtggagagaataaaaaaaagaattaattacatttaagaagaattaaatatccatttacacgaggatgttttaccaatggcttcaacattaggataattagggtcgtacttactaaataaaataaagagtcttaaagtataagattatgatagtttcatcagtagttttgaactgtaagagaagattaaaatctatacttacctaacaccagtgatagttttcttttgctttgtatcaaatactgccttgaatttatcaatattcataatatgtaaccactctagatatagtatagttgtctagtctgatatagttaaaccgttatgctgatttgttaacatttttagacaaagaaaaagaactaagtatgaactgaatttcaaaagttggacagtttataaatagttctttttatgattaatctgttgtccaatagttattacttcaaaaattccaatgagaaagaagtttatttcatgaatcttctaacgattttacatcatttttattattttgcttattaaattctcacatcattatgataaaataatcctctataaaatgccttaatcttctaaaaaatggaacattatgttaattttattaataataaaatatcgttacaaaagtattagtatttatatatctggatttttgtgattgaaaaaaagtagatatcatttcctgatacatatataatactatttgtgaaggtttgactgtatttttttgtattttacagtaaaaaagtactaagaaataatgcttagatttgaaacgtttgaaagaaaagttttaaaaaaatcaaaagaagaaatcaatgaaaagtcaaacgtacatatgagccataaaaatgaaaaccagtcattcaataactttgattttatttacgtttaattggtagtcaaaagctgatgtcatagatgttaaaacagaagtacatcaggaaccaatgaactgccctgaacaaatggaactggaagaatttttaaaggagtttgagtaacgtggttatattaaaagacaaaatgaagatcagtactgaaaagaacctcaaagaatatgaaacgcttctacaagcttttaaatgctcaaacgctccaaacaaagaacaacgaaacaaggactgtgagtacgcaataaaaaaagaacagatactaagcaatctaaagcattacaaaaaagtccgtaatgtattttacgaacttttttgtaccaaatgttcttgaaccgctgaactattagaagtgaaaaaagataagtagtcgagagatttttttagattttcgaaagtataaaaaactatacataccaacagtttcaaacgaaaaaactatagctgtaaccataggaataatgaaagcatgtgattttttcacataacgagagagggtggtctaggcgcgagaaccctagaccaccctctcgaaaaacatcgatacaataggctaaaacaatgaaatcatagcgttaaaaagtcgtgccactgtggtacaactttttacttataaatacgtataaataatacccacttattatacctttttttgattatgcaattgttagaaactgtttttattaacaagttattattttgataatgctatataaataatatattttgacaatgttataaatgataacattgttttattctataataaatcgactctgatactttgtaggtgcaccatatgaagagagatacgtccatgatccgccatattgtggttttctgtatacgtcatatctttgaactttataatttcttgctacttttaattttacagctttacctacttgagttgatgatatgcctacaaatactccaccactagaacctgataccacaccaggagaatatgctacgtcaacagataaatattttccagcaatactaatccctaaagaccatgttcctggacttcttgaactatcactccaatagaaaccgctattttccgaattaaaaatagtacctcctgctggttgatcataagcatttttatatggtgaaaatgaagatgtttgagggtcaccaacttttctataatcataagcatatgattcttttgtccgctcaaaataagctttcatttttgcaatttctatttcttcagctgctctaaattcttcttctgttggggtatatataataatgttgctattatcagtactttctaatgcagaaatattggaaacaggaatacaaacaaaaatcattagtagagcgattataattttaatagatttcataactttttcatctcgcatataatttaaatatttattatagcattatcttatataaatattgtaatataaactagcacatttttctatataaagtcaaaaaaatatgattataaggttattatttgatttatcgttatataacgtagtataatttttttgtaggaggaatagatatgaaaaataaatacaaaataattgttatagtggtaatagtatttcttctttcgtctttttatttcggatactcattaggaatagatgcagataaacctaatgtaattaataaaatatcaggaacatatcaattatttaaaggtaatgaaacattaacagtaacaattgatgatcaagataatctttattaccaaaatggatttgaaaatgaaagtattaaaataaaaacacaaataaataaattatacgaaaatttatatttatttgaaaatgagaagctaagttataatttaatcttatttaatgataattttttattgcttataaatattaatgatcaaacatacgacaaattagaaaaagtttcgaacacacaagtttttttataaaaaagaagaggtataccctataattttgtaatttaaatatatatattttctcattattaataatgttgatttattaaagtattaaaagtctaatatggctgtttactgctttaaggatatgaatatggggatattagtagattttactgaacattacaattatattaattaaatatgaaaaccttaatttgtcagttaaaagtaaataattaatgtttgagtgtgtagttcagttgaattacgcacttttaaattttataatcgttttagaatcagtttaattattaatgatgtgttaataattaaattaaaggcagttgaggtgagaatgatgagtgcaggaaacaggatatatatggctatagatttaaaatctttttatgcttctgtagaatgtgtagaaagagaattagatccactgaataccaatctggtggttgctgattcaactaaaacagaaaagacaatctgtttggctgtttctccttctcttaaacagtatggtatcggcggtagagcaaggctctttgaagtagttcaaaaggtcaaagaaatcaatagaaaaagaaaaaaagataacaggtatagggagtttagaggaaaatcacatattgattcagagttaaaaaatgacacaagtcttgaactgggattcattattgcccctccgaggatggcattttatattgattacagtaaaaaaatctacgaagtatatttaaaatacacctcagctgaagatattcatgtttattcaattgatgaggtttttattgatgcaacgagctatcttaagactgttaatacatctccaagggaatttgcaaaaatgattattcaggatatttataagacaacaggaataacagccacaacgggaataggaacaaatctatatcttgcaaaagtagcaatggatattgttgccaagcaatgattatcaatatgattatgaatatgactatatacgacataggggaactaaccttagatgcggctgaaaaagaaatacaagctgaatgggagaaaaagaaaaatgaataaatatctagtatttagatgcggtaagtgtatttggaaaaatactaaatcacatgagttaatgggagtcgaaatggctgaggacatagatgatgtgtttgaagatattcagcaagatatattagatgatttaaagggaatgaaagattactcgtacccagtatacagagttgaagctgattacatagatggtgctgccgatacaagcaaatatgattatcagatgcttggagttgtcaaacccgaaagaaccgctccgaaaaatcacacctgctggcacgggataattgaaactgaattaactgaatagtgcaaaaaaataggtataacattcaaaaagattaattttcgatgttatacctatttttaattgttttaagataatgttccacttggactgcaagtaagttttactgtttcgtttatagtttgtaaaaccattccaagaccgttataactttttgcggttgcgtatccataagcgcttgcaccagattttgatgatctaatattactcaatttccaatttatagctggacattgagtgtcaactgatgcagcagtacattttgcggttgagccatcataagtaaatgttccactggttttgacagaccataagattacatcatatgtgtttttgtagtatgttgttttattaccctttttagtgttacttcttgtaagcgttgatatttcttcgattgtcacttcgatataactaccgtcctcaaatctttcgactatctgtgtattgctttcttcatttaatgcaaatacaggtgtagtgcctaatagtgttaaaacagttaaaaaacttgcaaatattttttcattttctttactcctcctcaataatagttactttttttatagtattagaatcatcatatgcattgtatatcaattgattataaataagaagtgtagcacatagtgctattagaatacaaaatagggtaatgaatattttcttcacaatggacttaatagaagttcgctttaagatatattcattgtcacaattttctatataagaaatcataacattttttggttcaccatattttaagcatatttctttataagtaacgttttcgtcaatatcattcaaattatcttctaagcgcttaaaaaataatttttcatttttacttataaatggaaatgtacgtctacattcctttagatattgtttgacaacattattcatttcctgcctccatgattttaataatactagtgtttatatccatgtaatcaatgtaaagttggttaagatattcttttccttttggttcaagcttataataaactcttgtttttcttttaccaacaagccttttttcatcgataatataacctttgtctaaaagccgatagaggatggggtacatgactccttcagctaactttattttatcatcagataactcctgaagctgctggactattttataaccataatattcgccatttccgatttctatgatttttaacagcaacatttccatcctaaaaaaattgtttgaagatctgctcattaatccatctcctatctttaatataattaaatcacaatataatcgataattcaatacatataaaatatatgtagctattgacatatgtaaataaagtgctatcatatagttaaggaaacgttttcaacaaatatgaaaggaagatatgttataaaaaagagtagaaaatttattgtatctttaattattgctgtatttttagtgggaatatttccaactaatatttctactgtaactgcaatggaaaaagaaataagcctagatgcagattgtaatatttatagtgaatctccttacaatttattagaaaatattgttgatttaaaatcaggaggagtattaaatgttaatggaactagcaatccgttgttttgggaatttgataatatgagtactgcatttgatattattattagcaaatttgatgatgaattaaatgaaatctcatcagttggaaatttagacacattaagcttaaacaattggaaagaatattttaatgtatttaaagaaatgtattttgataatattgctagtggagatatagaagatataaatatcttaaatcaatttttcacagtatgtgaaaatcatgaaataaatagtcaagctaggattttatgtaatcaggaaaatgtcgatatttttgaattaatcaattacttaccgtacacaagtcctataattgatactattaatcagttgcctatgacacgagctgcttcatttaactttaataaaagcacagcagtaagttacgcaaaaaaatatgctgttaatcctaatccaagctatacaacatatagtaccgattgtactaattttgcatcgcagattctaaggtcaggtggtgcaccaacaaatactacatggaaaccatatacagcctcttggtcagctgcgcataattttgaaacatactggtattctagaagtaatagtcaatatgcatcaggaaactttaatacattctcaggtaatttgcaggcgggtgattttataatagcagattgggagaaggatggacgatataatcatgttgcttttgtagttgcatctgggagtaaaacatctagtggatattatgatgtaacaatagcacaacatacaagtaactattgtgctaaagtaagttcttcagtaaatggatgggaaaatacctctggaacatacgtaaggattagattctaatgaaagaaaaaataaagaaattgttgagaagtaaagtatttaatattttgattgttataattatattttttgtcgggctgaaattgtacactaattatataagcaatctatttgataattcaacaccacaaaaagcaatagcagaatatgtttataatataaattcaacatataaggtattctttatgaaaatagaagaagttcatagtgaagaaattgaaaagaatgatgaatgcaattattacatgataacgcaaagtattattggaaagcctaataatatgggaggaacatttaaagtcaaaaaaatagataatttctattatgtgacttcatatgataatatgcctcgatgatataagattccacctattgatttgaaggatattgtagtgttgggaatgaaaaagctaattatactgctgtgctaatcggtactgttattgtaagtttataacactgtcttatcgccgagcatatcatattttacgtggggtaaagagaagctataattggtataatcaatcatatgctcggctttaataaagcaaaaaaatggggttaagacattaatttgtcctaacccctttatgtatataattttttatatgcttgctttaaattttcagtctctatatcaatcaagccattttttaattcatatttatcaataatatcatgataatcttgaatagtatcgaatatatgactaaatgcatctttcgatggtttactatcattttgtacacgatcagcaaaatccaacacttgaaacctcaagtttttcatttctttcttttctgaatcagttatatgtttgtttaaattttcattaacattatctagttccttttttatgtcagcatttattctgtttccaacccaacgaagtggataaattttaatcggagaaacttctaccacaacaccaaataaagccaaccatgtagtaatttctttccagtttgatttaataaaatctaataacatttattatttcctctctatgttgcaaagcacaaaaggggagagactgttattctctaaaattaacttttgttattttgctttgtttgataaggaactcatttttaaattggtggttgcagtgactgtcattaattgtgctataatcctaccttcaacaatcaattcaaaatccttatcatagtcttccattttttctagagcatcgtgttgaatatcttttgatcctaatagccgaacttctggtactatttcaacttcagcttcagccgtgattttggggataaaatcgccattatttagcttattggtaactgtagttgttaatgaattcagattgttaagtgctacattagtatcactctgtcttttagtgttaaagcagatgaagacggagtgcggattgcctgtttagatgaaatgagatatcggaaatacttatggcatcatcagccgattacagatttctggagagttggtaaaggatatgcaaaaaactagtaacagatcagattacagtaagtgttggctatgataaagaaaacatcaaaactgactatactggcgaaataaaggatggcagatatggacgaaagattccaaaacatgctcatggaactgtcaatataggcagatatgtatcatcagcaaagctggttacacaaaaagttttaaactggtatgacacagcagtgttaataaaaaattaacaataagacgttttgcattgtctgctaatcatattactgatgaaagcagtattaaaacaaaatcgacaatacagcaaatggatctgtttactgatcacgagcagttaaaaaaagaagaagtaaagcttgaaaaagatttagaaaaggaaaaaagacttcaggaggcaactttgaaactgaagcagaaatatgggaaaaatgctgtattaaaaggtatgaatttagtagttgtagcaactggcaaagacagaaataatactatcggaggacataaggcatgagtgctattattcatttaaagcattatatttcaaaaaagtatctacctacgtctttagagaaaaacgttcagtacagtttccttgtatatgaaagttaaaacgtaaagaactattaaaatatgtgtggtaatattgagtggtgcttttaattccctacttgccacatatccaacaaaatatttaggaatatctattgtggaatgtgttatttccaatacaatactattcgctaaaattgacatatcttcgtcaataatatgatattttaaagaaatatctggtatgttaaaatgttataaaataatagaaatatttttatactctgttggtgtcattccgtatgctttcttgaaattacgagaaaatatttcatggtaccatcatagaaaacgaggaatacagtataactgaaaacgctaatgttgtgttgacgaatgaaaatatcaagaaaatgctgaaaaaaatatcagtcagataaataaagcaatataagcataacggttgacttattccaaaccaacaaaaaaagtgagtagcgtattagatatttttctcattaaatttagagttattgggagtgaatagatttctaggtttagtgatcgtgttttaacggtaagacggaaaccgttaatactattaaaatttccaatatcaatatgtatacaatagtattctatgctatactaaaaatgtgaggaaggttaaaacaatgaaagaaaagattttaaagaattgtaaaaaatactggtatgttatagcatttatcattgtaggctttatcgttttaaataaagagccagattatcttgtattgagaaaaaatacttttaaagttgaacttggtacaccattcaatataaaacctgaaacgtatttaaatacagaaaaattagataccgatgtaaaaaaagatgtattggaaaacgcaaaggtaactgttgataaagatttgaataatattgaaaatttttgtttagatgttggaaaatataaagttaccgtttcatataaaaacgaaaaagaaacttttacttataaagttgaagatactaccgccccagtaattacaggtgcagaaagtattgatatagtacaaagtactgatttaagtacttatgattttaaagttctttatacaattgatgatttatctcaaacagatgttaagtatgatactagtgcaattgatgtaaatacaattggtgcttatactttaaaaattatttcagaagacaattatggaaataaatgtgataaagaagtagctataaatgttgttgctccattgagtgctgatgaagtaattgttgaggaaacagtatcaaacgctgatggtacaacaactacaaagattgtaactagaaagaaaaccgaagcacagagtggtgattttcgcatagttacttcgggtgatacatcaaaatcaagtaataatagttcttattcatcttctagtagttcatctaacagtatttcaactattaaaccaagtggtagtacatcatcaaatagttcatctaataataattctagtgctgctaagcctaataatggtaatttaataattgattaaaataaattaagcaattttttacagttgctttttttgttgaataaaaatgtaattcaaaatatttagctttatttgatagatcagtaaagtatcccaattacaggaatggaaaagaaaaatggtatttgaaatttgggtattggagagtattagatggtgcaaattcttggaactatagacttttttattgattagaacattcaaaatagtaagtggatttgacgctttggtgcccgaattttccatagtgaaataaaacgatatggacaaatataaagaaatgatagagaaattcgtattgagtgctataattttagcaaacaaatttgaagttgtggtgggatgggtagtatgggcggatttcaaccaactattggtaaatggtatgattataaaaactacgatatagatgagccacagtggagacgtcttttgaatactgctgaaaagcttgaaaatgaatttggagacttgtttgtatatgaaagagacgggtcgattggctacggtcttgagattatttccagtccaatgacaaaaggatattatgaaaaaatatcaataagtttaaaaacctgttaaatatttttaatgagtttcactatgtttctacaaaaggaaataaatgtggttcacacattcatttcaatagaaaaacactaggttttaattctaaagaatacagttctctattaagtaatcttaataataatataagaaaagcagaagaagtagaccacaaaagagcaaataaaaccattgaaaatgtggttgctgttatggaattatatcgagaagaattaatcaaaatcagtggacgaaataaaagcagtttacgctggtgtcagtttgaaacatcaaatggatatgatatagaagttataaaaaaagttgcaaaagataaaattaaaagcgatagaaatcgtcacaatagatacaaggttgttaatactacaaatgaaaaaactgttgagattagattatgtcgaggaacgctgttatgggaatcttttaatacacgtatcaatttaatgtataatattgtaaatgtatctagaaactatcaaggcttgattaatttggaaaaattaattgtatataaaaataatgataaaacaatacaaatgatgaaaaattatattgagaataatgatatagaaaatagaaaagttgatataaaggaagtgaaaaaaactatcattaatgcctaataatagtttaagaccatcaagttttatgtttggcaaataaatatagatagacgttaattaaaacaattaattcattttattgttttgattttttaaatgaaataggttctagatgtctgggaacattgcttactcacccgaagaaaataaggaatgcattccttaattaaagaagaaagaggcaatgaatatgtgtataattattgtaaaaaatagcagaatggacttaccggataaagagattttaaaaagatgttggaataaaaatcctcatggtgcagggttcatgtacaattataatgatgtagttattattaaaaaaggttttatgtttttgatgatttttatgaaaatttgcaaataaatgataagctctataaattgaaaaatcaaagtgttgtatttcattttagaatatcaacaagtggtaaaattgatgagggaaattgtcatccatacccgctgactgatgacagtatataccttagaaaaacaaatttacgttgttctattggaattgcacacaatgggataattcaaaaatataaccgtaaagatagtgtgttaaatgatacataactgtttataaaaaacataatttatgatttgattacaaattaaaaagaaaattgatgaagagaaagttacagtttctaaatgcgaagagcagctgaagaaatcaaaaatcagcctatctaactttgaaaaggataaaaaggcactgctgagactaaagaaaaaagtagatgattttaatagaaaaatcagcgaaagtctatcggaatttgactgaatttaatgtctttgaacatttcaaaaaacaccctcaacttctgattatcatgcaacatatgaattttttgttattttgttataatgtttttattaatcatattattgtgctaaaattgataataacttgatacaatacaaacaaaaaagagtgtctattgaccgtagatcactctaagagaccatctaattctaaagagaagttagaatcgatgaacaatatatatatatatatgttttaaaaaatataagttaaataataacttgtatttagtatatcgtattaaaaaatcaatttaactataatagcatcgtttttaaacttcgctttagctagattaaatggttatataaaaacatctttgttaataaccgtcttaactaactgttgttcgaagtgaaaaaaatggtgccggagctaagaatcgaacttaaatttcatgattaccattcatgcgttctgccattgaactacaccggcattggtgcagacagcgagatttgaactcgcacgagctattgctcactaccccctcaagatagcgcgtataccagtttcgccatgtctgcaagtattaatagtttatcaaattattgcagaaaaataaagcctagaacgtaaagttctagacttttttctttaatctgccttaatcaagttgtataaagcatgacaataaatttctgttgctttcaataacgaatcgattttgatattttcattattaccatgaattaaattatcttcacccaaaaattcagctccaaaagcaacacagtttggcattgacttagcataagtcccgccaccaattgcttgaggtttgttaactgtatctccagttacactaacataagcttcatgcaaattagtaattaacttagaattaggatcgatatatagagccttgcccaaatcatgagtttctctgaattcatagtttgcacaagcatgtttaaattttgtaaccattgcatcaaaatccatgtcatgagggcaacgtaagtcgagaacgattttaacttcttctttataataagatataactcctaaattaagagtaagaggacccattaaaccggtatggtcaattcctaattttttaccatgacagtcatctaaatattcaagaacaaaatcaacaactttgttatcaacgacagttgctaaatatttgcataaatatacaacagcattaatgccctcttcaggagtacttgcgtgtgctgatttccctttaagaattaatttagtatgatttccttcctcttcaatatccccagttaaattattagtatttaggaatttcttataagattcagtatattgtttgtaattcccttcaattactgcttcgcaagtttctggaacaatatttggacgacttcctgcacataaatagattaatccacctttttcaacatgtcctgtgatttcaaaaccacaacctgctttttcaccataaacaacaggaaaagcagcatcaggagtaaatcccattttaggataaggcatctttgtgaaataatattttacacaattactacctaattcttcattgcatccaaagataaccctagttttcatttttgtaggaatatttaaagaattaatgatctttgcagcataataaccagccattaatggtcctttatcatctgcgactccacgtccgtaaagccttccttctttagtaataacttcaaatggatcactatcccatccaaccttgtttacaggaactacatcaagatggcccaaaattccaaaagtttcatcaccagttccaatatcaatatgtccagcatgtccatcaacatcctgcacttcaaagccatcacgtcgaccaatttctaacattgcatctaaagctcggcgattggctgcgccatagggagcaaactcagcaacggtactatcatcttgagttgaagggatggcacataacatttttatatcatcaatcatttgatcttttatttttaaaacttccgctttaaaatcaatcatattatcacctcgtcatcaattataacactattagttataatatttaaacaattttagtaataatagtgttatgatatatataataatcggaggtatgacatgaataatgtaagatttcacataacagtcaaaggaattgtcgtattaaataaccagattcttttaatgaaacgaattcgaccatcaagtgatggtcttggttattgggagttaccaggtggtgggttggaatatggtgaaacacctaatcaagcattaatcagagaattacaagaggaaaccggattagatattatcataatcaaaccagcttatactttcactaaaattagaaaagattatcaaaccgtaggaatcggatatttgtgtattcccaagaatgatcatgtccgtttatcgcatgagcatagtgattatcgctttgtgagtatacaagaggcaaaagaactgttaaatccagaaatttataatgatataatttttacaattgaagaatattatcagaacgttcatgatatccagtgataatattttaaatttgattatagtcatccaaaataacggtcttgaaattcaagactttttcttttatcagttgatattttatttatttgaagtaaaataaggtagttgaaaacaaatagaattaaggagttattatgaacgaagaaattattgcaatagcatcaaaagaattagaaataactaaaaaacaaatcaatgctgttttatcattattagaacagggaaatactgtgccttttattgctcgttatcgtaaagaagcaacaggagggttagatgaagatcaaatcagaaatattgataaatattatcaatatcaagttagtttattaaaacgaaaagaagatgtaattcgtttaattgaagaaaaagggatgttaacagatcaactaagggctgatattttaaaagcaacaaagttaaatgaagtagaagacctttatcgtccttataaagaaaaaagaaaaacaaaggctactgaggctaaagctaaaggtttagaaccattaagtaagtggattttatcactgccaaggggagaacttaaagaagaagcaaaaaaatatttaaatgataaagttgagactgtagaagaagcaattcagggagctttagatattattgcagaagtaattagtgatgatattaaatatcgtaaatttgttaaagatataatatataaatctggtacgattgaaacaaaagtaaaaaagaagaatcctgatgaaaataaagtatatgaaatgtactatgattatcacgaacgagttaatcgaattgtatcacaccgtattttagcgattaatcgtgccgaaaatgaaaaagttattactgttaatattgttttagataaagaatttttaattcaatatattaatcgtggagtgactagaaatcgtaatagcagtgttaatgaatatttattgaaagctgtagaagacagtttaaatcgtttattattgccatcgattgaacgcgaagtgcgtaatgaattaactgaaaaagccagcgagcaggccttaaaagtattttcaatcaatttagaaaagttattaatgcaggcacctttaaaagataaaatggttttgggtctggatcctgcttatcggacaggatgtaaattagctgttgttgatcagaccggaaaagtattgaagattgataaagtatttattactattccaaaagataattatgataaagaaaaaagaattttattaaatttgattaaaaaatataaaattgaaattattgcgattggtaatggtactgcaagtcgtgaaagtgaagcttttatttctcaattaatcaaagataataatttagatgttgattatgcaattatttctgaagctggagcatcagtatattcagcaagtaaattagctaaagaggagtttccagattatcaggtagaagaaagatcagcggtttcaattgcacgacgtcttcaagatccattagcagaattagtaaagattgagccaaaagcaattagtgtcggacaatatcaacatgatattgctcaaaaacaattagaagaacaattagattttgttgttgaaaaagcggtaaataatgttggagttgatatcaatactgcttcagtatcattattacaatatgttgctgggttaaatagcggagtggccaaaaatattattaaatatcgtgatgaaaatggtaaatttacaaatcgtaaagaaattatgaatgttagtaaattaggtgcaaaaacatatcagcaggcaatcggatttttgcgaattcctggagctaatgatccatttgatgcaacagcaattcatccggaaaactatcaacaagcaaaaaaattacttaaattaatagatgctgatgctagtttattaggaacaaatgaaattgctgataaattatcaaatattaacaaagaggaagtaatgaatgaactaaatatcgacaattatacgttagatgatattattgatagttttataaagccaaatcgctcaccccgtgatgcatatgcaacaccattattaaagaaagatattttaaaaattgaagatttaaaacccggtatgcaactagaaggaacagttaggaatgttgttgattttggagcttttgtcgatattgggttaaaaaatgatggattagtccatatttcgaagatttctcatgaaagaattaagcatcctttggataaactaagtataggtgatattgttgaagtctatgtcattgatgtagatgtcaacaaacatcgtgttggattaagtatgattaaataaaggatgagttgatgaaaaagtttctagttggaatagttattataataattgccagtattggctttaatttaaaacctgataaaagagatcaagctgttgtggttcaagaagagcctgtagttaaaaaagaagaagttattacttataaagaactattagaatatcttgatatttttaaaacaggagatattattaatattgaaaatactaattatttaagttcatatgctattccaggaagatggaaacatactattttctatctaggaacatatcagcagtttagtcaggtttttacacctgaagataaatattatgaggaaattaataaacattataagaatcaagatgaggttttagtactcgacagtaattctacgggtgttaaaatacggacatttgatcaaatggctaatcttaaagaagaatcgtatttaaaagcactttccggctatcgttttaatgaggatgataattttattaagacatatttaagtcgggcgttagattatttgggaacaccgtatgattacagcatgacaacttatgatgataaagctttatattgtagtgaattagtttattatgcactactagctaataatatagaagtgactaaaacgagcagtattgtcgaacatgttgtaattaccccaacagatttaagtgattttttagaaacattagaagatattgaccatgtatatttgcttgaaaaagaagataattggataaatgatgcgataaatgactagtttttgctttattttacttgtattcctactttaatactagtattatataaacgaggtgaacatcatgaaaatttcaaccaaagggcgttatgcaattagagttatccttgatattgcgatgcacgatgatggtaaatatattccactgaaagatattgctaaaagacaagatctgacggttaagtatttagaacaaataatttcattactaaataaagcgggctatttacaaagtcttcgtggtaatgctggaggttatcgcttatcaaaaaaacctgaagaatgtataattggtgatattctaagaattacagaaggtgatttagctccaattccctgcttgaaagatgaaattaataattgcagtcgtgccaatgaatgtattacattaccgttttggcaaggattagataaagtgattaaagactatgttgaaagtgtaactattcaagatttaatcgatcatgcaaatatgcaagtgaataattattcaatataaaagccgtaaggcttttttattatataactattgacataaatttgctctcaaggtataatcatattaatccgataggaaaagagggaactataatgaatgagctaattttttataaaaatagaggctgttgttaataatagatttgattagataaagaaaatggaggaaatagtaatgacttataataatcatattagtgaattagtaggaaataccccaattttaaaattaaacaattatgttacaaaaaatcaattaaaagcaaatatttttgctaaactagaatattttaatcccgcaggaagtgttaaggatcgaattgctaaagccatgttatttaaagctaaagaagatggaattttaaaaccggattctgtaatcattgaaccaacgagcggtaatactggaattggattagcttctctaggaacatccttaggacaccaagtaattttaactatgccagagacaatgtcgattgaacggcgaaatttattaaaagcctatggagctaaagtagttttaactccaggaggactaggcatgaagggagcaattgccaaagcagaagaattggccaaagaatacaaaaatgcgtttattcctagtcaatttgaaaatcaagcaaatccaaatgcacattatctaacaacaggtcctgaaatctaccagcagctagaaggtaagatagatatctttgtcgctggtgttggaactggaggaacaattagtggaattggaaaatatttaaaagaaaaaaatcctagtattaaggttgtagcaattgaacctgctgcctcaccagttttatctaaaggaactccaggaccacatgcaattcaagggattggtgcaggttttgttcctaataccttaaatactgatatttatgatgaaattattacaattgaaaatgaagcagcctttgctactagccgtgcaattgctagagaagaaggagtgttagtaggtatttcttctggtgcagcactttatggagcaacagtattagcgaaaagaattgaaaatgctggcaaaaacattgttgtgttgttaccagatactggtgaacgctatttatcaactgcattagttgaacaagattaataatatggatactgtctttagggacagtatctttttctaactacaaaaataatttttaattataattatattttaaaagtctatcataaaaatgtgagtgtttgttatgcaactaggataaacaactaataatttaaagtttaataatgagattcactatttaaaaatataaatagacgggaagaagagcagagaaagatgattagttgtaatgaggtgattgtagtcaatatcaatattagccaaaaagattgtccaaaatatctttaaattatggacaatgttttttttgttatagtatacaaaaaagtacttggaatatttgtaattgatatcttaataaacagaaattatatcattgaggtgatatgataagttgtcttgtatggacgagcttaaacaaaaaagttcagttaaaatcctgttgatttgaaaaagtaattagtacagttaaaaagagtaaatcaaaattaaagttatagaggataatgtattggttattataataataagatatcattctacattctcactggacatttaggaaaataaaaaacatagtctgaagagcattgtgtaaaatacttttaatgctactcaattgctatgccttttattcaaataatgatgttgataagtaacgttctccagtatctggcagtagaacaacgatgtttttatttttatctgttattttagttgctccatgcagggcagctccagcagttattccaactagtaggccttctttttttgctaatattcgtgcagcctcataagcatcatccgtagaaactgttatcacttcgtcgactagatccaaatcgagaattttaggaataaaattcgctccaattccttgcaaatcatgcgatccagcttttcctttagtgattaatggagaatcttttggttcgattccaataattttaatatcaggatatttcttttttaatatccgagcaattcctgtaattgtccctccagtaccaattccggcaacaaaatagtcaatattatcatcaaaatcatcaataatttctaatgccgttgtttcttcatgggctaagggattacttggattaacaaattgacctggaatatagctattttcaatcttattagcaagttcgttagctttatcgactgatccttgcattcctttttctccagccgttaatacgattttagctccataagcttttaataatttttgacgttctaatgacatagtttcaggcatcgtcaaaattaattcattaccatagatagcacacgcaattgctagaccaatgccagtattaccactagtaggttcaataatcgtagtttttttattgattagttgatcctcataagcctgttcaattaatttaagaccaacacgatctttaacactgccaccaggattaaagaattctactttggcaaatattttgttgtttacttcacatgcttttttaaagcggtcaatttgaattaatggagtttttccaattgtatccaaaacactttttttaatagtcataataaattcacatcctttttctttttatatcacatattgaagtgtaagtgatataaaaattataattttatttagttgtctttattaaaatagtaatttataatacttttaaaggggactgtttatgaaggattataaatatttagaagtttatcaaactattgttgatgatattgaaaatggttatttaaaatataatgataaaataccatcaattcgtaaaatggcaaaacaattagatgtaagcagaactacggttgaaagtgcatatttacaattattagtcgagggttatatttacgcaaaagaaaaagtaggatattatgtggatgtgcaatttagtaatcaaattaaaaataaaaagaatccaaaagtaattacaaaaattgatagtcaccattatcgatatgattttagtggacgtcttgttgatgtggaaagctttaatttagatacttggaaaaagtatattaaaaaagcattaaatcaaagtgaagatttaatgagttatggagaaccattaggggaaatgcctttaagagtagctttgcaggaatatagccatgaataccgtggagttcggcatcctgtaaataattatattattggtgcgggatttcaaattcttctttatcatgtttgtagtctttttggtaaagataatatagtcggaattgaggaaggaggattcaaacaggcagaggccgtttttcatgattgtcatatgcaggtagttaagttaccggttgatgaagaaggcattactttagagggattaagacaagctaatttaaaattattatatttaaatagttcttctggagggtatcatggtcatcctatcaaacaacagcgtcgtttagaaatcattgaatatgcgagagctaatcaagtctatattattgaagatgatcataatggagaattgaaatttaacactaaaccaatcgatgcaatgtcaaaactagacaatgaccacattatttacattggttcattttcaaaattattactaccttcaataagaattagttatatggcattaccaaaccaattagttcagttattttatgaaaagtctcgagattatcatcagactgcatcaaaattagaacagctggctttagctatgtatgttgaagatggacagttagcacgacatttaaagcgattaagaaaacattaccgcaataaaagtactcatttgttacaaaagcttcgaactacttttcctcaacataaattcgaattatatgaaacctcattaaaaatcacaatggcaattaaggctgatttggttgatcaatatattgctttagcaaaacaaaatgatattttagttaataaaaatagtaataatcagattactttatctttttcaggaatcttagatcaagatattgatgaagcagttgatagattaaaagaaatttggataaattaaaaacagtgcattgcactgtttatttattaagatgtttacagctgtaataagcaggaataccgtttaaataattaatatgtacttcaccttgaattaacggatataagtaatcatataattcttgggtaatatcatttccagcttcattaatccaggcagttggaattttttgttctaagttagctacttttcttacatcagttgaaatataatcaatttcataaggggtatttgaaattcgtttaaatcccattacttggccggattttccagttaacgcagtttctattgctttttgtccaactacaaatgactcatttaaatctgttttactcccaatatgcatagcacatcgttgtaagacgtttaattcaatacttctaactttacattgaaattctttgaaaactaatgattctagcatttttccagttcctgaatgaagtacatgaccaaaagcgtcttttttagcatatttagaatcatcatcaaggaagtgaccatctttatctttgataccttcgcttacagcaattacaacacagcgtttacgtttaaatacttctcgaatatcttctaagaatttttctttatcaaaaactacttcaggtagataaattaaatcaggggcttcattatattcattacgagccagtgcagcagctgctgtgagccatccggcatttcttcccataatttcaataattgttactgattgcagctgatagattaaactatcatgaactacttctaagattgaagaagctacatatttggcagctgaaccaaagcctggggtatgatcagtacccattaaatcattgtcaattgttttaggaataccgataaattgaatttcactattgattgattttgcgtaatcatctagtttcatgacagtatccattgaatcattaccaccaatataataaaaatcagtaatttctaattcagttaaaattttaaataattttacatatgtttcttggttgtcaatatgtgttggtaatttaaaacggcatgaaccaagatacatagctggtgtttgttttaaagcattaattttttcacctgtatcaaattcctcaagcaggtccatataacgaccttctaataaacctttaatcccgttgatcattccataaacattttcatattcttcgctatgtttagctttatgaatgattccagcaagacttgcattaattgcgattgtgggtcctccagattgtccaataatacaatttctttttttcatcttattctcctttttcctgcctaattctatcatttttagacagtaaaaaaaagacatattaagtgattaacgtctttttcttaaaataatgtaaagaattataattagtgcaacaaagataaaaatatttgcaggctgagtcgtttgatgccgattactagaaatgattgaaattgacttcgtttcatcctgagttaaaaaatctaatagattaatcttgacttgattatcctggatctttccataactagtttcactaatatttcccggcattttaatatttaaatttagctcgagtcccatagtcttcaaatttgttagagaataattattaatatcttcaatttcacttgtattaaaaatattgttaatagtactgtgatcaatcgtaacttgataagttccttcttttttatttgtagtgaagaaactcaataagcttttattaatatcttttggtgcaataagctgaaatcctatatattgggtaccattaatatctttttttagttctttattttcccacgtactcaactcactattagttaatttatgttttaaatcagtaagtgaggtaccataagaatctaataaatcttcttgaatgagtacttcaattgttaaagatgcattactttcatcaataaattcgatgtcaacatttccttttacgcagcctgttaatgataacaacatgatacctaccaaaaataatttttttaccatcatctacctcctaatgttagtgtgccacaatcttcattttctaaaattaaaaagtggatttaaaattgttaaatgatataatttaatcatggttaacatatagttcacaaaaacactttaaaatatagaaggtgatataaatgagagtagaaattctatatacaagtaaatcaaaacacatcaagcctgttgctgaagctatggcaagatgggttaaaacatatgcaaagacgattgatcaatttgatgctcttgctccagtcgatttattagttattggctttgatgattcggcttggaaagatccgcagttagagacatttattaaaagtttaaatagacaaaaagtacataatattgctttgtttaatgctttctacattaatgatcataaaatgaaaaatatgattaaattatgtcaagaaacagatttaccacttatgcgtgagcaatattcatttaagcttacatttaggcagttaaaggaaattgatcaatgtgtaatagatgctgctcgtttatatgtagaagatatggtgaacttggtaagggattattattaaattagtaaatttatactaataacaaattattaaaagctatcttaggatagctttttctttttattataaagaatttaaggaaatttattaatattttaattaaattataatttgttaaaatcctaaatttaataaaaatatatatttataaaaatattaattgacaataatttattactctgatagtatttttttaagatttaaaggcgataaactttaaatcaaaaaataaagggggaattttaagtatgaaaaaactagaaatcattatcagacctgagaagctagaaattttaaaagatattctaactgattgtgggattaccggaatgatggtttcaaatattatgggttttggtaatcaaatgggctatactcaacaatatcggggaactaaatattcggtaaacttagtttctaagttacggattgaaacagttgttaaagatgaagtagttgatcaaatgattaaagaaattacaaccaaactttcatctggtaatgtgggtgatggtaaagtatttgtttatccagtagaacaggcagtacgaattcgaactggtgaaacaggagaaaatgctctgtaacagatttataaaaattaaaagggggatcaaatatggaacaattaattaatattgtttgggtgtttcttggtgcggtaatggttatgctgatgcaagctggttttgctattttggaagctggcttaactcggcaaaaaaactgcaacaatgttttaatgaaaaatattatggactttgcaattggatcaattatatttttagtagtaggttttggtttgatgttcggcgaatcattagggggaattgtaggtataacaggattcattgatccgacgacattaaatttatcacagtttgaggcactttcaccaacagtatttatcttttttcaaacagtcttttgtgctacggcagcaacaattgtttctggtgcgatggcagaaagaactaaattttcatcatatttaatttatacgttagtaattagtttagtaatttatccaatctctggtcattggatctggggtggaggttttttatcaaaaataggatttattgattatgctggttctactgctgttcactcagttggtggttgggccgcattaatgggggcagttgttttaggtccacgaatgggaaaatataatagggatggcagtactaatgcaattcctggtcataatatcatgatggccactttaggcgtatttattttatggttttgctggtttggatttaatccaggttcttctttagaagcagcaggttatataggtcatattgcgatgacaacaaacttatcagcatgtgctggtgcattagtagcaatgtttcttacttggaaaaaatatggaaaaccagatgtttcaatgactttaaatggtattttagctggtttagtagcgattacggctggttgtcatattgtttcattatatggtgcaattgcaattggagctgttggcgggattttagtagtttatggctgtgaaatcttagatcaaaaattacatgttgatgatcctgttggggcagttggggtacattgtttaaatggtgtctggggaacacttgcagttggattatttgcatgcaataccccagcaagtgaaggaactttaggcttattctttgggggtggaactgctttactgattacgcaattgattggtgtaattattgtagcagtttgggtatgttcaatgtccttcatcatgtttactttaattaagaaaacggttgggttgcgagtaacacctcaggaagaacttgctggtcttgatttaggagaacatggttctgaggcatatcctgattttcttaaaaaataatttatcgtaaggttgggagaccaacctttttatatggaaaaaaagctcaaggtgtgatacaattttatcaattttaggaggagatactatggataataaaaactatggttttgaaacattacaaatccatgctggtcaaaagccagatgtgacaactaaggctacggggatgcctttatatttatcaaatgcttttacatttgaagatgctgatcaagcggcgcgaatttttgcgttagaggaaggaggatacttctattctcgattatctaatccaacagttgatgctctacaacaaagaatggcggctttagatggcggattcggggctgtagcatttgcttctggaactgcagcaattatgggattgattatgactgtgtgtgaaactggagatgaaattgttgctgcaaataatttgtatggtggtacgattggttctttatcaggaacgatggcaggaatgggatttaagacacactttattaatccaactgatttagaggctttaaaagcggcaatcaacgataaaacaaaaattatttttgttgaatcggtaggaaatcctaatggagatatgttagactttgaagcaattagtgctattgctaaagaatatcaaattttatttgttgttgataacacaacaccaaccccttatttatttaaaccaattgaatatggagctgacttagtagtctattcaactactaaatatctagctggtcatggtaatgttatgggtggtgtgatcgttgatagtgggaactttaaatggaaagataatcctcgctatccattatttaacatgcctgacaaagcttatcatgatatagtttatgctgatttaggagcgggtgctttttgtactaaagcagtagcaaagacattacgtgatttaggagggtgtatgtcaccgtttaatgcgtatatgactttattaggattagaaacattatcattaagaatgaaaaaacacgttgaaaatgcccgattattagcaaaatttttaaatgagtgtgatgatgttgaatgggttagttacgcggaattaccagatagtcctaactatgaactagctaaaaaatatttccccaatggttttggtggattatatacttttggagtcaaaggtggtgttgctggtggtaaaacagtaattaataatattaaattatttattcatgttactaattttgctgattcacgttcattgctgactcatcctgcaagtacgacacatgctcaaatgtcagaggaagagagaatagcaggtggggtaaaacaagaaacaattagaatgtctgttggtcttgaagatgttgaagatttaattgcggatttaaaacaagcatttgctaaaatataaaataattaggactattgtttattgttcaaaacaatagccttttttctagtttttttattagtcctcatgtataattttaatgaggtgattaaatgcagagttttttagccatgcatattaataatatagttatgatcctgctgctttttatctatgtagtctgtttaaatggactattttcaatgcgacgtcgtcttataaaatggcgccgtttctttgcgttcttatttattattagtaccgcgggtttaatgttaggaaccattcgtaatgagctgatggtttattggtttaataatgctagttttaatattgagagcaattttgagtggatgattaagataagttatgatctgattagtttaattattatgattttaatgatttttttggtgaaaaatattttagattttattaaaaatagtagtcgtgatgcaattcgtaaattagctattaatgccgatattatagctatcttaattattattagaactgtaatcgttccgctgattgttaaactagctagagtattggaattatttggattaaataatcaaactagcagctctaatgatatatttctttatgctttgccatacttgggattaccggaggttgcaattattgttgttacaatctttatcaatatactaggaataagttattggaatcgaggtgctgaagatgttatggcaaaataaaagttatgatctagttagttatctcgaaataataataggtattattgccttgatttgtttgctatcattactttatttgtggtaccaacccaaatgtcaaaacaagtttaataatattgtttttttaggacacttgataatttgttttgatctttatttattagtagataaagttgcccatttattaatgagcttttatcaggcttatctgcatcatctaaaatacaatatttacgattatgcattattaagtagtgatattttattaacagtggttttaatttttagtacttttttgtttatcaataatctagaacatttattaataaagaaagatagtaaagaaaagtataatttaattttaaatcgagtttttaaggcctataattgtttgatggtagtatttatttttaaagatgttgtattaaaaattgtatatgatttcttggcagatgttagaggaattaggttacattatcacccttatacgattaataatttaatggttacaatcgtattaatgttgttattaggcttggtaataaatttttataagaaaaaaacgacttgatctgcagcacttcttaaagttagagtaactttttgaagacactacaaatagtcgtttttttaatcaataaccatagcattaggaataggtgctaaaggattttctttgttgatacggtcatagaacaaagttccctcgaagtgatctagttcatgttgtaaacaaattgataagaatcctcgagcaacaattttcacttcttgatcagtcaaaacatcatatcctttaacggtcaccttagcgtagcgtggtacatatccttgaacttcatcattaacagataaacatccttcaccatcttttaaataagattgtttttcagtatgtgaaatgatttttgggttaactaaagcatagtcatcagccccaataacatttccatcttcatcaaaatctaaaacatgaatagcagtcattcgtttaggaattcctaattgaatagccgcaattcctacagctgggcgtaaatcatatttttcagaagtttcagggtcttgagagttaacaagaaactcatgcatttgtaataaaagttcgcgttcttcatttgtgattggtaatgctacttcttttgagacctcacgaatcttttcattatggtcatcaattatatctttcattgttatcataggttcacctcattttaattctgatagtattatatcataaaatgaggtgaaataaagactttatccgactctaattcttgaatttccacaaatgattaataataagaatacaactaagacaatggcaaaccagtttgaagaaccgaaaccaccgcaaccacaaccgcatccattgcttgaaatgttacagctgttgcatccaccacatccaaatggattagtgataaaaggattgtatgaattacatccacatccagaatagttaaatccgcagttcatattatcgcctcctttagtatatcctattctaatatttatcttttgtttgggttattgtagataatcgataaattttaagttataatataaagcaattaaggagtgtgttagtatggattacaattatccgttagactatagatggtcaacagaagaaataattgatgtaatggcattatataatgctgttgaaaaagcttatgaagaaggtattagcaaagaagaatttatgcaggcatatcgtaagtttaaagcaattgttgatagtaaaagtgaagaaaagcaattggacaaacaattttacgaaatttctcattattctatatatcaagttgttaaagcagccaaaaataatgattttattcgagtaggtgaataaattggcaggaatagaaaagattaagcgattatttaaaagtcgtggggtcgataaaggtatttatgctagtgtttttgttttggcaatttttggaataattatgattggttcagcatcagttggaagtgtgacttctcatggggttacttatgctttaaaaaatatgattactcaaagtgtttatgtaattgctggggctggggtaatgatttttattgccagagtatttaaaactcggtatattacttatagtgcatcgatgaaattatacttattaggaatctttttaatgataatctgtatattttttggtagtactaaaggctctcatgcatggattaaatttggttctttatttagtattcagccagctgagttcatgaaagttgcaatgatactgataatgagttattttttaactgaaagtgataaagcctttgtagtaaaaggtagatttaaaacacaacagctgaaatctgctttttataaagaaaagtttttaaaatgtgttttcctgccaatgatgttagtagcaattgctgctggagttgggatctttgtgcaaaaagattttggaacaactgttattttagtaactatttgttttgtttgttttattgggacaccgcgtcaatactttaagaaatacaagcgaatcgtatgggtgttcattggggtttgtggagtattgtttttaattattgggacttcagtattaaaaggttaccaattagggagaatttctacatggttagcaccattaagtgatccttatgatacaagtatgcaattatcaaatgctttaattgcttttaataatggtggtctttttggtgttggtttaggaaattcaacccaaaaatttggatatattccagagtcacaaaacgattttattggtgctattatatatgaagaattaggtatcattggtttaggcttaataattattccaacatgtatcattatttttaagttattaaaatattcacaagaaattaaagaaaataaatcacggattattttgttgggaattgcttcatatttctttttacatttattgattaaccttggtggaatatctggattaattcctatgaccggagtaccattactgttaatttctgctggtggatcttcatcagttactgcatttgtagcagttggtgtcgcacaagcaataattgcaaaacataatcgtcaaaaatttgacaccgattaggctaatatacatataatatattaggtgatcttatggatgaatttaaagagttcttaaaaacaatccctagtataaaacaagatgttcttaatggacgttatacttggcaacagttatatgaaatttttgttatgtatggtaaagatgataaattttggttaccatataaaacaggtaatagtggttttgatttaaatatgttactagaagtaattaagaatattgatttaaatgctttatcgagtagtttaggttcaattgaaaaagttttaaatgttgctagtacttttttagataaaaaagagcctgctaaggaaagaaaatggtatgatgaatgaagaaattagatattatcttcgttatcatcctaattggtatatagttttatctcggtatcctcaagaatacgagcatttaattcaagaatataaagatggtaaaaatcaacaatttattgacaagattgatcaagtatccatgttaattaatatggtagaaatgatgatgtaggtaagatggaagagatattagataaattaattacagaaataaaactggatcagcgatatattgattatgttgaagctgaaaagaaacttcataatcaggagattgattcattattgcatgaatatcaaaataaactgaatcaatatgatgaattaaagaaatataatcaatatattgataatcaggagattaaagatgaaattcgtgatttaaagaagaaaattgcaagtaatgaagatattttagattattattgtaagtatcatcgtttaaatgattttttagatgaaataactaaagtagtatttgggggtatttctaatgagttagatttatcaccatatcaattataagagggcttatgagagtaattgcaggtaagtataaaagtagacagttaaaaagtgttaaatcaaatttgacaagaccgacaacagatcgtaataaagaaaatctgtttaatatcattggaccatactttgatggtggagcagtactggatttatttgctggtagtggtggtctaggtattgaagcattatcaagagggtatgaacatttgtatagtgttgataaccagtatgcagcatttcaagtaattaaagaaaattttacaatgttgaaattagctaatgctcatgtatataaattagattatcgtaaagcattaaaacgatttgctaatgaaaaacttaaatttgatttaattttattagatcctccttatggaaaaggattagtagatgatatattagaatttctaattgtaaatgaaatgttaaatgatgaatgtatggtagtagtagaagagttaaaggaagtagaatttaaaccatttaaagaattagatttgatcaaaaaaaatgattatggcattacagctttaaatgtatttaaatttatggcaggataggacgatgaagaaaaatattgcggtttatgcaggaacatttgatcctgtaacaaatggacatttagatattattgaacgagcaagcagaatgtttgatactttatatgtaacgatttgtattaatcctaataaacaaggactcttttcaattgatgaaagaaaagaattattaaaggcggcatgtcaacagtttgataatgtgatcattgattcttctgataaattatcagttgaatatgctaaagatgttggttctcgaattattgttcgaggaattagagcaactatggattttgaatacgaattacaacttgctttttctaatcaatatttagataaagaagtagatatggtctttttaatgacaaaaccatcacattcatttatatcttcttcggcagttaaagaaatggtgagccataaccgcagtgttgcagggctagtaccaccatgtgttgaatcagctttacgaaagaaatatcaaggggaataaatatttccctttttatatggtaaaataattgtcaaaataacctatttttgttatgatgtaaaaagaaaaaaaactatgtcaactgggtataattaatattatttcccaattatacctcgttagaggtattttttatggaggaagattatgaacatatttacattaaaagattttgcaacagaagaaattaatcagattttggatgaagctgaagagtttaaaaacggtaaaaaagttgatttcaaaggacaaaaagtagttgcaaacttattttttgaaccatcaacaagaacgcattatagtttcgataaagctgcttataatttaggttgtcgaactcaaaattttgaagcagcaaattcaagcgttcaaaaaggagaaactttatatgatacggttaagttttttgaatcaattgggtgtgatgctgtcgtaattcgccatcccaaggaaaactattatgaggatttaattgaaagaattaagattcctgttgtcagtggtggtgatggaactgggaatcatccaagtcaatctcttttagatttaatgacaattcgtgaagaattcggtcattttgaagggttgaagattgtaatcgttggggatatcgttcactctcgagtcgctcatagtaattatgagataatgcagcgtttaggaatggaagtatatactagtggaccacgtgaatttgaagaagctggatataactatgttgattttgacaaaattttaccagaagttgacattgtgatgttattacgagtacaacatgaacgtcatcatgatttgatgcgattaacgactgatgaatatcatcagatgtttggcttgaatcaaaaacgtgttgataaaatgaaagaaggggcaattataatgcatccagcaccatttaaccgtaatgttgaaatagctgatgaaattgttgaatgtgcacaaagccgtatttttagacaaatggaaaatggtgtatttgtaagaatggcattattaaatcgggtgttaacaaatgactaaaatattattcaaaaatggtaatgtattttatcataataaactccaaaaattagatgttttgattgaaaatgatcgtattgcagcaatcgctcaagaattaacggatgctgatgagattattgatttaaaaggtaacttattaacacctggatttgttgatattcatgttcatttaagagagcctggatttgaacacaaagaaactattgcaaccgggactaattctgctaaatacggtggttatactcatctagttgcaatggccaatacaatcccatgtatggatgatgtagccacaattaaagattttgctttgcgggtagcaaaagatgcgaaggtacatacttatacatatagtgcaattacgactgaattaagaggtcaagaactagtagattttgatgctaatagtaaagaagaaattgtagttggtttttcagatgatggtcgtggagttcaatcatctatgatgatggaaacggcaatgaaagctgcaaaagcgaataatagtattattgtagctcattgtgaagacgaagctgaattacagccaggtgcttgtatcaacgatggtaattatgcaaaagaacataatttagttggaataaataatgcatctgaatttaatcatgctgttcgtgatttaaagttggcaagtgaaatcggaaatcgttatcatatttgtcatatatcaactaaagaaacagtagcggcattaaccgaagctcggaaaacaaatccattagttagcggtgaagcatgtccacaccatttaattttaactgatgataatattaaggatatgaatcccaattataaaatgaatccaccgcttcgaagtaaagaagatttagcggcattgattcaaggaatcaataatgggggtgtaactgtaatttctactgatcatgcaccacatgcgattgaagaaaaaaataaaccaatcgacaaagctccatttggaattattgggaatcaacatgcatttagcttaatgtatacatatttagttaaaaaaggacttatttctttagaaaaagttttgacatgtatgtctataaatccagcaaagataattggaatcgagcatgatctagaagttgggttaaaggcaaatcttgctgtttttgatttagaagaagaatatgtaattacaaaagaaagtattaaatcaaaatcaattaatacaccatttcttgaaactaagtgttttggagcattaaagtatcatgttttagatggtaaagttacaaaaatataggaggcattatggcaaacttacatgggatgatgaagattacaagcattaaaaatattgcagatgatgtatatgaaatgattttagaaggtgaaggagctaaatatatcagtgctccgggccaatttatcaatattaaaatcaatgatagtttacaaccttatttaagaagaccgatgtcaatcagtgattatgatgatagtcatattgtgattgtttttaaagtagttggagaaggaactaaaatcttaaaaaataaagaaatcggcagctatttagattgtttgattgggttaggtaatggatttaccattaaggatggtaaagctttattgattggtggtggattaggaacaccacccctatataatttaggtaaaaagcttgcagccaaaggaatagagataacgacagtactaggttttggcagtgcaaaagatgttttctatcaagaaaaatttgctgaattttctaatgtttttgtcgcaacaatggatggcagcactggaacaaaaggaacggttgttgatgtaattaaaaatgaagggttgacttttgataattattatacttgtggaccagaaccaatgctagatgctttagcacttaattatccagaaaatgggcaattatcatttgaagctcggatgggatgtggctttggtgcctgcatgggatgctcttgcaaagttaaaactagaccatataaaagaatctgcgttgaaggaccaatcttagaaagtaacgaggtgattgtaaatggctaatttaaaagtatctttacctggtttagaaatgaaaaatcccattattccagcgagtggaacatttgggtttggatatgagttcgcaaagttttatgatatcaatattcttggttcaatgatgcttaaaggaactactttagaacctcgctatgggaaccctctacctcgaattgctgaaggaccaagtggtttgttaaatgcaattggtttgcaaaatcctggtgttgatgctgttatggctgaggaattagaaaaactaagaccgctatataatgataaagtaattgctaatattggtggtagtgcacctgatgattatgtcgaaactgctaaaaggatttctactcatgacatggtaggagccttagaattgaatatttcatgcccgaatgtccatagtggtggaattcaatttggaactaatccagaaatggcagctgatttaacacgtcgagttaaggaagtttctaaagttccagtttatgttaaattatcaccaaatgttactgatattgtagcaatggctaaagcagttgaagcggctggggctgatggtataacgatgattaatactttagtagggatgcgctttgattttaaaacaggaaaaccaattattgctaataagacgggaggatattcgggacccgcaattttcccggttgctctaagaatggtttatcaagtaagtcaagcagtaaagataccagtaattggtatgggcgggattcaaaatgcccgtgatgttatcgaaatgatgtcggctggtgcaagtgctgttgcaattggttgtcagaatttaattgatccatatgtatgtgaaaaaattattaatgatttagaaccattattagaacaaattggtattaatgatataaatgatttagttggacgttcacataaattttaataaaaatactagagtttattttaatacaaactctagtatttttatttattgtatcgtttttcttttttatcgagtattactaaactaaataaggcagtttttagtaaatttaaatataataaattattgctatctctaattttagcagttatttattccaaatcaaatggttttatagtagaagtttcatttttagtatgaatatagttattagggtcaacgttttcataattataaatcaaatcattaagatcatttaaataatattttctgattaatataatggtttgtttatatatgcttgcacttaattaaattgtatagcctattattgaggtttacaagatgataaattatattcaatatttgaaaaatgagccaagtattgaacatagaaaaaacctcactaaacatagtgagattttttgagtgttttagttatgtcttttcttttttaatactaatggtaatactaacgcacccataataaataatgaagtgtatagagcgatatttgtattatcaccagttttgacgttaccttgtttaacatcgtcttttttattagcatctggagtgttaggtgtagttggctctgctggagtaactttaactaaattattgatggcattttgtaagttgtcatatgcggtttcaatttcggtaacagtggcaacttcattggctgcaacagcttttacatcaataagaatattagctaatgctgcccagctttcactagtgtattctgcactattcaatgattcagctttattaattaattcgttaagggcatctttatttggttttagtcttagctgtaagaaggctcttactaatttatcgtgcgcttcttgaacttctggttctaaagcattttgattattaacaacaactttagcttcatctaaaacaggtaacattgcattccaagtgcttgttagataatcttcagcatttagtttagcaatttttttaattaaattttctaaatcagttttatcaccttttttgaaagataatttttgcattacgtcacttaaacggtcaaacgatgcatttacttcttcttgcgtagctaaagaagttccattgatctgttgagcttctgctagagcggctttaaattctgtaactacagcaggaacaatagtatttaattctgcttcagtaactttaagtgcttcctcaattgcaatatttaaaagattctttttaactactacgtattcaacattttcgtaattataaatcaaatcattgataatatctgtgtagaaactatctttttgataattagcagggtttgctttaacatcactgatcatagcatttaaactatcaatattttcttgaactgcagtatttgttgtagttttgtcagccagagcggtttcgattttatttattactagatctagatcagtcttgttgtagttgatttttgattgtgtaaataaatcatcacgtggtgatccaagtgtatacatcagtctttcaaagcttttgtaatccatttccttttgatattctgctccccatgtttttaatgcaaatccagcataacgtgggaatagtgtcctagtcaaaatatattctggtacatatccgtgggcatcatcccaaattgggaatacttgtcctaatgacttgtcaagattttctgttaatacttcatcatttccataatgatatgatgattttgaataatgatatcttgtaaattcttcatatgtccgttttggtaatggacggtctagtttgctctgtccttgttgtggccataaatcatgatagtttgatgaagaacttgacatgattgtatatccagcattagctgtagtactggctttgattgatccgtacattcctccagcccagaaatcaacaattagacggctgtctaatggtactattcctcctaaatcaaagatgttgtcattccatactagtacttttaagttttgtttgattagttcgtctcccgcttcattgaagaaaagtttgatagcatcatggtctgtcgcagcttcatttcctgtcacttgacgtgcccattcctgtaaaactgttttaccggcagttgtataaccactttggaaatattcatcaccaccgatatgaatcgttttagcatggaagaaatctgctgcttctttataaacagagatcatatattcacgaacttcctgtttagaaaagtctaatgctttggttgaaccaggaatgcaccatccgctatggaaatttgcttcttgttcagcgtgacctgggaagtcgatttcaggaataacttcgatattgaatttagctgcatagctgactaattcatcaacttcttcctgagtccaaaatccacctttacggtcaacaaaatcagcagcaattttcgaatcataacgaataccctcgttgtctttaagtctcagctgtaagatattctgtttgtaatatgccatttgttcaatctgatcttttaaccattgaattgaatagtatcttcttccagagtcgacctgaagcccacgaacaacttgatcactgtaatcttgaacagaaccagcaggaaggctttttctttgagcgaaggcctgcaatatagtcattgcaccattttgaataccttgaatgtagtcagaatggatgacagttttgtcttgatcgatatcgatttgataggcatcgattttgcttgttgttacagctgcaggaagttcaaaagtgattggctgtttaactaaaacaataccttcaccttgtgaggcatcagtaacagttttgatcgtatagtctttgatcagcccttttttaaccatactgtcggctagatattgggtcttagctttactgaattcatcagttgaaaaaacttgcttagctgtatttaatttataaatttcatttccatttttttcaaaattctggacagctgggacagtttctgggaattcagagaagtctgcatcatagttgatagaagctttctcttcaactgttttgttttctactttttcaattttgaaatcatcgatatagaaaactccagaacctaagtcattaccagtccattccatataggcaaaaccgtaaatttcattagttctaggaccagtagtgatagtatgttcattagtctgccactcagtgctgaccttttggttagtttggatattagaagcaagctgccaaggagacgtagtatgcttaccttcaatatcaagaactccggtagacatctttactccggattcattccagtaatgggtagtaatcttgtatgtagtgttaggctcaacgttatggaaaataacattaacactacctttaccataattataacgccagataggaacttcagaaggattttcaggtttaggattcccaactttgatagagtattttccgtcaaaagctttttcgtcagttctgacagctttgtagagttgaacttcatttttatcaatttcgtgttcaaaagacggattagtaattagtggagcatcggcagctttaagtggaccgacgttgatcgacatagccataagtgaggccatgacaatcggtaataatctctttttctttttcatatatctctttccctttcatgatatgataataaataaaatatagcagttatttgcgataacacctcctgattaatatgatgatttgtctatacatttctgtatctaactaaattgtaaagggcatgaggaaatgttacaatatagaaaattgcaaatgatttttaatttttgaatagattttcaaaaatagaatatcttttcacttcttgaaaagtagtgttataataatggcatgggttagtgctgttatagttttatgaataagaggggaacaataaaagccaaagaattttgaagtagtacgggaaaggaggatatcgaggagattcctcgataacagacaatggctggttttatttataaactgcaaaatattgtaaacacatcaccagatagcgatgatacaaatataaatatcgctagatgcattttaaaaaatattgataaaataaaaaaacggacttcattgcaagattttgctgatatttgttatacatcacaatcaagtattagtcgtttttcgcagtatttaggttatgcaaattttaatgattttaaagctgactgtattgggattcaagaagaaacagatgaaatgatcatagatactcgagcgactaaaaaaattaattgtgttgactatgcccaagcaatttctgaaagtttagtaagaatgcaagaaacatcaattgatcaagaaattgaacagttgtgtgagtatattcataacgctaaaagaatttttatttttgcaactcatattcctggcgatcttgcctgcattatgcaacgtgcaattttaacaacgggtaagtttattgaattttatcctcgtaaagagcatcaaatggaggttgctaagcaaatccgtcgagatgatctctgtatttttttatcattagaagggacattattaatggaaaaagcaatcactattccagcaattatttcattagctaaaaatgttctgataactcaaaatgttcatattaaattttcagaacaatttacacaagtaattggattaggtgggcatgatagtgaaagtattggaaaatataagttattgttctttattgattgtttgttaaatcgttattatcataagtacatagtaaataattaaagtagaagtacagttatttggacaaataactgtactttatttttaaaggatatttttaggtgctaaagaaaaaatatcttgagagaaataatattttatatatcttttatatttaatatcatatataatatatcggtggtggtgattagatggaattagatgaattattaaataaaaatcaaaaagaagcagcaacatatcttgatagtcatttgagaataattgctggagcaggatctggaaaaacacgggtggtaacgtatcgaattgcttatttgattgatgaaatcggtgttgacccgcgaaaaattctagctattacttttactaataaagcggcaaacgagatgaaagaacgaattacatcattattaggacctcatgcattaggttcgttagtttgcacaattcattcattatgtgtccgaatattaagacgacatattaatgtgattaattatccaagtaattttatgattatggatgaagaagatcaaaaagcattaattaaaaaaatttataataatttagatattgatgcaaaaacaatcagtattaaaagtatgattgcatccatttcaaattataaaatggctaatattgatcctgaacgagcaatggaattagcaggtcagtttcaaggtgaaataaagaaagctaaagtatataaagaatatcttgaatatcaagaaaatcattttatgcttgattttgatgatcttttattaaaagcagtatatatttttgaaaattacccagatgtattagaaaaatggcagcataaatttcaatacatccatgttgatgaatttcaagatgttggcaatattgaatatcgtttagttaaattgatgtcacaagacgcaattacttgtgttgtaggcgatcctgatcaaaccatctattcatttagaggggctaatgttaattatattcttgattttgataaagatttcaaaccttgtaaaacagtgattttagaccaaaattatcgctctacgggaaatattttaaatatttccaatagcttaattcgtaaaaatcgaaatcgattagaaaaagacctttatactgaggctactggtggtagtgaagttattcattatatgggaaagagtgaacaggaagaagcagattatatttgtagccagattgaaaaaataattagtgaagttgacggagtcaattatcgcgattttgcaattttatatcgtgctaattatttatctcgaacaattgaacagagtatgattagtcatggaatagattaccggatttttggtggtttgaaattctttagtcgaaaagaagttaaagatgcattgagctatctgcagttagtatgtaatgatgaagatcttgcattcgaacgaattatcaatgttcctgctcggggaattggaaaaaaaacattagaaaatattcaattagtagctttgaataatcaggttagtttgtatgaggcattgacactatttagtgatcaaattaagctgtcatcaaaagccaaaaaagaaataatcacattagttaaagctgttgaaacagcaaaacagtcaagtctgccgcttcatgaaatgtttgaaaatttgatgaacgatgttggatatattgatatgttgaaaaaggatttagaagataatcgaattgataatattcatgagttacaacggtcaatttatgaatttcaaaatcaaaatcctgatattgcaacaattgaaaattatttacaagaaatttcattatatacagataatgataatttggatgatggacaatatgtcagtctgatgtcaattcatatggctaaaggtctagagtttgattacgtttttgttttaggtttatcggaagggattttcccaagtttcagagcattaagcgaatcagatgaaggattagaggaagagcggcgtttggcttatgttgcttttactcgagcaagaaaacaattgtttttgacagatagtgaaggctttagttttgtaacagattctcctaaaatttcaagtcgctttattgatgaaatcgggagtgaggggattaagcatgtaggaacaaagccacgatttaaaacagcaaactttattaatacagctccaactaaagaagaattagtagggaataatgaagtgactgactggtcaaatggggactttgttttacatgatacttttggtaaaggtgttgttgttaaagtcaatggtaatactttagatatagcttttgaattgcctgctggtttaaagacattgatggcaaatcacaaagcattaaagaaactaacaaattaatgtgctaaacgcacattttttgttttatagttatacgtattttggtataatagttaagattaaattaggagtgagataatggatgatttaagtagatataaggaactaaaagcaacaattttatatcataatgatcgttattacaatcaagataatccagagattactgattatgaatacgatatgatgatgcaggaattaaaaggattagaacaaaaacaccctgaatatattactagtgattcaccgactcaaaaagtaggtggtagtgcaaagcgtgaagctggtgtactcgtacgtcataatgtgccgatgttatcattgcaggatgtattttctaaggaagatgtagatgcatttgttgcggatatgcaagaacaactggtagatccgacttttgtggttgaatacaagattgatgggttgtcaatggcattgcgctatgtcaatggtaagcttgatgttgctgttactcgtggtgatggtgtcttacaaggtgaagatgttactgttaatgctaaagtaatcaaggatgtaaaaaatattttaaaagaaccgattgaatatcttgaagtccgtggtgaagtctatatgaccaatgaagcatttgataaagttaatgaaattcaggaaattaaagggaagaaactttttgcgaatcctcgcaactgcgctgctggaacgttaagacagcttgatagttcaattactaaagagagaaatttatcaatgtttgtttttaatattcaagatgctaaaggcagagaatttacaagccacagtgaaggatatgaatatttaaaacggcaaggaattaaaatcattgaagattataaaatttgtaaaacagctaaagaggtttgggaggcaattgaggcgattggtgaaaatcgtgataaacttggatatgatattgatggtgctgttgttaaaatcgatagttttgctgatcgacaaaaactcggagcaacagctaaagtacctcgttgggcagtagcttataaatatccgcctgaagaaaaagaaacaaaattattagcaatcgaattgtcagtaggtagaactggaagaataactccaacagccatttttgaaccaattcgtttatgtggaacgactgtatctcgagcaactttacataatcaggattttatcgatgatctagatgtgcggattggtgatacgatcgttgtttataaatctggtgagataattcccaaggttaaaggagtcgttaaagaaaaacgccccgctgatagtgctccatatgtaattggcaatacttgtccagtctgtggagctccagctgtacgtgaaggtgataatgcggatataaaatgcacgaatcatagctgtccaagtaagttagttagaaatattgttaactttgttggacgtgatgctatggatattaaaggttttggctttgcttatgtagaaacattagtggatcatggttatttaaaagatttaagtgatatttatggtttaattgataaacgtcaggaattacttgataaaaaaattattggtttagttaaaagtacagataatttattaaatgcaattgaaggtagtaaaaataatgatgcaattaaattgctaacgagtttggggattagtaatgtgggaaaatctgctgctaaaagtttaatgaaaaaatttaaaagtattgataatttgatgaaagctagttatgctcagttgattgaagtcaatgatattggtgatattagtgctatggcaattataaattactttaagaatcctgataatcaggcagttgttcaacgtttaaaagagtatggagttaatatgaatattatcgaagctcaagatggcgatgaacgttttgatggcaaaacatttgtcgtaacagggacattaccaactctttcaaggaaagccgcaagtgaattgattgagaagcatggcggtaaagtctcaggttcggtgtccaaaaaaacggattacttattagctggtgaaaatgcgggaagtaaacttaccaaggcccaaaatttgggaattaatgtaattagtgaagaaactttactagagatggtgaagtagctaaaatagtgttataatgcactgtataaaggaggaacactagaatgaaaaaaatagtggctttattagcgatagcattggtgctgagcggttgtagtgatgctaaagagaccgttgaaaatcaaacagcaaatgatgtatccactaccgatagtttagatgattcattttatcgagtagttaattttaatacgaatttaagtcgagaagattattatactgcttttggaaatactatggattttcaaacaattggacgagaattacagattttatctactgatcatttctcaactaatgattattatatgtctgaagggcaatatcttaaaacggatgatatgaatcaattattaaaacgctctgaggatactagtaaatatccttataccttacaagcacagcggggaactactattggcggagttgcaaatccaatcatggtaagtacagtgcatgaacaagattattatgaaaaaaacggatctgaatatgtcttaaagggtctatcattagcaatcgtactagatcctcgtgatgaaaaaaatgaacgtttagacacctcattagatgaatcgttagttgttgattttgggcgtgaagcaattagtaaattatacaaatatttacagagtaaaaaagacttaaaagatattcctgctaatatttgtgtttattatgcgactaatactaacgaaagtgatattaatggtcgttatattttaaaaagttattgtgatggcagtgtgggaaatattgaaacattagattacaaaaattatatgtttacaagtacagaagcaactgctgctgatgaagatacagcatcacaatttgaaatttttaaaagtaatatgaaaaaagctgcaactgaggcagttggtgtaattggctatggtcgttataaaaatggtcagattcagtcaatgaaaataaatttaaaagtaaatattaaaacatatactgaattgctttatttgatttctactgcagctgatgaattaaatactcaatttagtggttttgatattaaagtattagttagttcacaagatcaactagaggcattgattgttaaagataaaggtgaagatgcgaagagtatcttgttgtattaggaggtaatttatggaaaataaagaagaaatgttaaaaaagcttggattgaaaacaatgtttaatattactgatgcagaaatgccagagttagtagaagaatatgagatttttatgaatcacgttgccgtattagagaaaatagacactgatggtaaggcaccattagcatatccttatgaaattgagacatgctttttacgtgatgatgaaccgattgatgtaataagccgagaagatgttttaaaaaatgctaagagtgttcaagataatcaaattaaagtaccaaaggtggtgggataatgaaagtttattcaattgaagaattgcataatttaatcgttaatcaagaaatagatttaaatgaatattattatgatttatttaaagaagtggaatttcaacaaaatcgcttaaatgcatttgttacaatcactaaaactcaagcaatggataatattaaagaacttaaaatatctgatgaagaaatattgaaagggattcctggagtatttaaagataattacaatactaaaggaattaaaacgacagcttcaagtaaaatgctagaggattatgtaccagtttacgatgctgcggttgttgaaaaattatataatgaaggtgttagtttaattggtaaatcaagtatggatgagttagcaatgggtggtactaacaaatccgctctaactgggcctgtatataatccgtgggattcatcaaggatagcgggaggatcatcaggtggcagtgcagcacttgttggtagtggggttgttccatttgccttaggtagtgataccggagattcaattcgtaaaccggctggattctgtggtgtagttggtttcaagccaacttggggaagaatttcaagatttggtgttattccttatgcctcaagtttagatcacgtaggtgcttttactcgaaatgttcgtgatatggcaattgtaactgaagcattagctggtcgtgatgaaagagatatgacttcaagcacacggccagtaccacattatttaaaagaattgaatagtgatattaggaatatgaaaattgctgttttaaaaacagttagtaatgaaattagaaatgatgatattaaaaataatttcaaccatgtagttgcaaccttaaaacaattaggggcatgtgtcgaagaggtagaaattccagttcatctagctaaagcaattttaccaacttacacgattatcgctaatagtgaagcaacaagtaatcattcgtgcttagatggaattaagtatggtgatcggcaacctggttcatcaactgacgaagtaatgattaattctcgaactgatggatttggtgctcatattaaacgtcgttttattttaggaaatttagccttagctacagaaaatcaggaacggatgtttagaaaagctcaacgagtacgtcgtttgattgtagaagaattaaataaaatttatgataattatgatattattttgactcctaatggtggtagtgtagccccaaaacttgatgaagcaaatgatgatcgcctatcagatgaatacttgattttagaaaatcatttagctttaggaaattttgctgggacgccaagtatttcaattccgtctggttttagtgaaggaatgccgattgctataaatctgatgggacgtttatttgaagaacaaacagtattaaatgtcgcttatgctttagaacaagcattaggatttgaaaatcaatattcaagagaggggtagagagaatgaattttgaaactgttattggattagaagttcattgtgaacttaaaacaaaatcgaaaatgttttctggggccccagtaacatttggtgaggcaccaaatacaaatgccaatatcgtcgatatggggatgacaggggcaatgccggtactaaataaatctggtgttgaatttgcgatacgggtatgtagtgctttaaatatggaaatagatgaactggtacaatttgatcgtaaaaattattactattcagatttaccaaaaggattccaaattacgcaagatcgtttcccaattgggcgaaatggaacaatgaagattgaggtaaatggtcaaacacaagtaattgaaattgaaagattacatatggaagaagatactgcaaaacaattacactttgacgattattcattgattgattataaccgagctggtattccgttaattgaaattgttactaaaccgacgatccgcagtggtgcggcagcagctgcctatttagaaagattaagacaaattttcttatttacagaagttagtgatgctaaaatggaagaaggctcaatgagatgcgatgtcaatgtatcaattcgaccatatggtagtgaaaaatttggtacaagaacagaaattaaaaatttgaattcaatttcaaatgtacaaaaagcaattgaatttgaagttgctcgacaagagaaagtcttaattagtggtggtgaggtactccaagaaacacgccgttatgatgaagatagtaaagaaactgtagtaatgagagctaaaggtgatgcagtagattacaaatattacccagaaccaaatattttacctattcgattgaatcatcaatgggttgaagggattattgaaagaattccagagatgccagaatcacgagtagctcgatacataaatgaatacaaaattcctaaaactgatgcattgatacttgttcaaactaaagaagtttcggatttctttgatgcgacagttgcttatactaagcattataaaattgcatctaactggttattaggcgaggtacaagcatatttaaataaaaataatttgattattacagatactaatataactcctgagtatttagcaaaaatgatcaattatattcaagatggaacaatctcaagtaaacaaggaaagaaagtgtttgaaatcttgatgaatgaaggtaaagatccagaaattattattgaagaaaataatatgaaacaaatttcttcaccggaagaattaactaaaattattaatgaagttcttgataataatcctcaatcaattgaagattatagcaatggtaaagatcgagctgtgggattcttagttggacaaattatgaaaaaaaccggtggtcaagctaatcctggtcttacaagtaaattactaattgaactattgaaacaaagaatttcataatgtacaaataattctatatttggtacaatggttgaaggaggatataaatatgtctcaaagaaaaagatttagttttgatgatgaagtagatgatacaattgatctatcaaaagatgatcttaaaaattcatcaatagctaataatgataaaccttcaaacgacaatgtctttgctgatgaagatggtttagatgccaaagcttatcctactgataacgggggagataaatcaatgaaaaacaagaagaaacgcaagtttaaaattaagaaatggcaaattgcattaattgcttttctatcaataattattgtgttcgtcatctatgtatttgttgctggaggaaatgatggaccagtttatggtgatcgttgtgcttctttaattgcaattgacaaaagtaaatttacaggagttgaagatgcaatcaaagcagacccaagcgttaatagtatcaatattgaagtagattgtcgaattgttaaaattagtatgaattttgttgataatacttcttcagatactgctaaacaactggcaacaaacgccttacacacattagatgatactttaggtgaaaataaggaagaaggtagagcatatagtaatttatttactactgctaatggccgtggacaatacaacgtagagtttgttctaacgagcaatggtgatactaatttccctatatttggtactaaacatccaaatagtgatgatattacttttactggagctaatgtagttgatcaagctgcaactgatcgtgcggctaatacgaacgctaatcaatagacgagcatggctcgtctttatttatgaggaggactaaatgaaaaaaaatgattatttttatggtgaatgcacagatttaacccacgatggtcaaggagttgttaagattgataactttacatactttgtaaaaggtatgcttacgggtgaaagaggacggctaaaagtaataaaggtattaaagaattacggaattgcacgtttaattgaattagaagttacttcaaaatatcgtattgatcccaaatgctctgtctttagaccatgcggaggctgtcagttacaacatcttaatcctcaaggacagatgatttataaaacaaaacgggtcaaagattgtttagaaagaatcgggaattgtaaagtggcggtaaatgattgtattatgatggaaaaaccgtggcattatcgcaataaagttcaaatgccagttggagttaaaggaaatcatttagtaactggtttctataaacaaaagtctaatgaaatcatcccatgtgaaaactgttatattcaaaatgaattatcaaatcagataactaatcgagttaaagaattaatggaagagtttaaaatttacccatatgataagttagctcatcaaggtaatattaagcatattttgactaaacacggttatcatacagacgaagtaatgttagtactaattagttatcgtaataaaattaaagatatagataaattagtggaaataattacaaaagaatttccaatgattaaaacagttattcaaaatattaatcatcgcactgataatgtaattttaggtgaacaagaagtcattttgtttggtaatggatatatttatgatactttattaggtaataaatataaaatttctttaaaatctttttatcaagttaatccaatccaagtagagaaattgtattcaaaagcaattgaatttgctagtttatctaaagaagacatagttttagacgcatattgtggaattggaacaattacattatcagtagccaaatacgtaaaaaaagtgtatggtgttgaaattgttgaaatggcaattgatgatgcaaaaaataatgcagttttaaataatattagtaatgctgaatttaaatgtagtgatgctggtaaatatatgctagaactagttaatcaagatcagcatttagatgttgtctttgttgatccaccacgtaaggggtgttcaacagaatttttggataatttgattcaagcagaacccaagaaaataatttatatttcttgtgatgtagctactcaagcacgtgatatcaagtatcttcaagaatttgggtatcatgctgatgtctgtcagcctgttgatatgtttcctcacacaacacatatagagacggtagtacttttgtccaaactcaaaacaaagaaacatatcgacatagaactacatacggatgagctggatttgacttcttcagaaagtaaagcaacatatcaggaaataaaggagtatgtcaaagataaattcgatttaaaagtgtccactttaaatattgctcagacaaaaacgaaatgcggcattattgaaagagagtgctacagaaaacctaagaatgaaaatgcgaagcagccaaaatgcacattagaaaaagaaaatgcaattaaggacgcatttaaacattttcagatgatttaacaattaaataataaattttacatagagcttttgctttaatcgaaatgatgagcagaggctctatttttgtttcagaaaatgaaaaggaaggaggttaatcgtaagatgatgaagcaaagcaacttgagaaaaatggaggtaaacaaattatgagtacaaggtatttttatgggcagcaggcagagcagttttctttctacagaatgccgaaagtgttatttacaaatgaagtgtataaagggttatcgactgacgctaagattctgtatggacttttgctggatcgtatgaatctatcagcaaagaatgaatggaaagatgaattgggaagagtctatattattttcacactcaaggaaatccaagagtctttacagtgcaaggataacaaggcaacaaaacttctgaatgaactggaaaagaaatatgacctgattgaacgaaaaagattaggacagggaaagccatgcttgatttatgtcaaaaactttattgtggataactatgtggaaagacatttctgtaatcgtgaaaataacgattctgcaatcggtaatagtacgagtcaggattcgttaaaatcacgatgtaataatactgagttaaataagattgaaaatagtgatattgatccttctttctttccggaaaatccggaaaagacaatcgaagagatgggaagtgaaagtccttatgaacaatatatcaaagaaaaattggagtatgattctttagttactcagtataagtaccatgttcagatgttagatgaaatcgtggatattattgtagatactcttaatagcaatagaaaaatgattcgtatcggtggagaggataaaccaacggaaattgtaaaaagtcaatttatgaaattagagaatcgccatattcagcttgttatggataatatgttggcaaatacaacgaagattaaaaatattcgccagtatctactcacgacactttataacacaatgcaaacgaatggtagcttttaaggaggaacgctatggttaagaaaacgaataaaaacattcaattaacgagttatgaggatattttcaaaacagaagaaacacgaaatgatgagaaattagaaaaagtgcagaatattccgcttagtgaattgcacccattcaaaaaccacccgtttaaagtgattgatgatgaatccatgcttcgaacaatagagagtgtcgctcaatatggtgtacttgctccggcaatcgcaagaccaagagcagagggaggttatgaactggtgtcaggtcatagaagacttcatgcttcaaaacttgcaggacttgataccatgccggtgattgtaagaaatcttgatgacgatgctgctgtaattttgatggtagattccgtgcgcccgtaaggcgtttggggtggacacccaagcgacgtgggtcattatgattttgttttgagaaaacaataagaaaaattattaagtgtgaagaacacagtcttatcgccaacaactaaccttgaatggaaacataaaggggacaacagcacgtttgtaaaggcacaagtcaacaaagcttccaagttgcgactgagtgtcgaggcgaaaggtactatatgaggatgaaagctaaactgtttgaaggaaagtcagaggctggagctaaccatctccgcaccgaagggaagatgttacggtgttgtattggcagattagtattttgctgtctacaatctgcgtgataatcaatgcaagctagccataagtaatggaaaatgacgaaaactcccatgccgacaatagtacaacttatcataatgatgctaaacggggattacctaaactgaaatgcccaagtggctatgagtaatgccgagaggtgataaatctcaagtgtaaaaaacaagagagatgactctgaatattcagcatggtaacggagccgtcgtagtagtccgaggaccttgaattgacaaggatagccgtaaaatcggaagcgaataataacgcccacatggcgaaggatggcagtttatcgttcaatactaaaacgaggaaggatgtgtgagacattgagagaaccagtaaaggtattgaaaagtctttcagaacaagcaacaaacaaacagtataaattcaaaagattatatcggaatttatacaacccagagttttactttctagcttataagaatataagccaatcacaaggaagtatgacacctggtgtagatggcaaaagtctagatggtatgagtgagaagcgaatcagtgctctcatcgaaagcataaaagacttcagctatcagccaaatcccgcaaggcgagtgtatattgaaaagaaaaacagcacaaagaaacgcccgctgggaatcccatcaacagaagacaaattagtacaagaggttgtcaaaatgattcttgagagtatatatgagcctaacttttcagaatgctctcacggattcagacctaaaagaagctgccactcagctttacagcagatacagaatcaattcaccggaattacatggtttgtagaaggtgatattcatgcctgtttcgacagctttgaccatcacgtgttggtggatattctaagggagagaatcgaggatgaaaatttcttggctcttatttggaaaatgttgaaggcaggctacatggagcaatgggtttataactgcacattctcaggaactcctcagggttcaggggtaagtccaatactggcaaatatatatctgtcgaaattggatgattttgcagagaacttaaagaaaagcttcgataaaggtaagtcaaaagataaccttgagtatcaaagggcggcaagcaaattattctacatcagaagaagaaaccgagcaaattgggaaaattggaatgagcaacaaaggaaggaagctctgcgtctgcaaaaggacgccattaactacatgcatagtttaccaagcaagagagcaaacaacgaggaatacaaaagtttggtctactgtagatatgcggatgactttctaattggagtcataggttcatttgaggatgcatctgaaatcaaggaaaaattcagagtatttctcgaggatactctgcatcttgagatgtccgaaaaaaagaccaagataacacatagtcaagataaagcaagatttcttggatatgatatcaccaccgcaaagaactcagcgcttatgtatgactcaaagcatcaactaaggaaaactcatacgggcagaattaaattgtacgccccaagagataaatggcaaggtaagttgatggagtatggtgctctaaggattaggtacaacgaaaatggcaaggaaatatgggactcacaccacagaggaaatatggttcatatgacagacgtggaaatagtatcgcaagtaaacgcagaaatcagaggaatgtacaattattattccatcgctgagaatgcaacagtcatcaaaaactttgcatttatcttggaatatagcatgtacaaaaccttcggtctgaaatatcgaaagagtgtttataagatacagagaaagtaccgtaagaacgggatatttatggttccatacaatacaaagacgggattgaaatactgcgagttttatcatgacggatttaaaaagaaacgttatacatgcagtttcgagcctgacttattaccacaatacgtcaaacacgataatccaaattatctgaggacaaggattaagctaggtgtatgtgaactttgtggtgaaaacacagatgatatatgtatgcaccatgttaagtctttaaaatcaatcaaagcagacaatgaatggaatattattatgttggctaagcgtcgtaagacacttgcagtttgtccgaactgttatgccaaaattacgaaataactgaaagactatgataaatgggaagccgtatacatcgagaggtgtacgtgcggtttcggggcgaggctatggaaacctattatggagacatggaaaggcgctgtagtcttagcctacaatctgcaaagagaaacgattttactgagtgaaagagcatttgcctacaaaatgaaattggaggcgataaaacatcaaggggaacgcacagatttaacttctacacaagttgtgtcgaagttggcagccaataaaattggtgaagcacaaggtgtaagcagagaaacggtaagaaggtttatccgtttaacggagctaattcctgaattgttaaaaatggtagatgataagaaaattgcatttaatcctgctgtggaactttcgtatttgaagaaagaagaacagcaggattttttagaagtaatggatatggaacagtcagcaccatcattatcacaagcacaaagactgaagaaacttagccaagacggtctttgcacgattgatacaatgaaagagatcatgaaggaactaaagaaagatgagattggcagaataagtttcaaaaacgaagatttaaagaaattttttcctaagtcttatacgccaaagcaaatgcaggatacaatcttcaaactattggaaagctggcaaaagaaaagacaaaaacagatggagaggtaatggcaaatggataaaagagataaagagctgcattttatgataagccaatcggagagggaacgaattgagataaaaatgaaggagatggaaatcagaagtctgagtgcatatttaagaaaaatggcattggacggttattgtgtaaagttagaattagacgatgtaaaagaaatggtttcacttcttcggatttgtagtaataatctgaatcaatatgccaagaaagctcatgcaatcaattctatctatgaggacgatattaaagatttggagaatcgcttagaagaaatttggaatgtcgctaaggagattatgctaaggctggcttccatttgattttatgcagatatggcgaaaagctatatctgttacataagcaacagcttgacatcattgttcaatttctgatgatcctttaagatgagggcatagaggaaaggagcagtgaaattatgaatgaacttacttataagccatgtggagattacttaattccggacatgaaactaatgtatgaggaagtgacgcctttaggaaaatatggacgcttacgtagggaatatttaaagaatttcgccccaattttatacaatgatttgatattgagtgaagagttatttccgcatttacatgaaattgatgaaacagctaaaaaacgaatggaaattttgatggaacaactgatagtaaagaatccggcacctgataagaaaaatgagcagatggcttgggtgcaacatatgaatatgctgaaagctcaggcagaagaaatcgtattatcagaattaatatattattaaatggtttgaggttaagtcacaatgatttagcctctttttatgtggtggagggtaatttcaattattatagaagaatattcctatatttatgaagataatctctttgaaaagatagaatgaagtgctataattatcgtggatacatgaaaaataatgacctgttgtagaatagagaggtgacgacagtggaagttagttataaaaaattgtggaagatcttgatagataaagagatgaaaaagaaggatttgcaagcagctgcaggaatcagctgggcctctgttacaaagctttcaaaaggtgaaaacgttagtatggaggtactgataaaagtttgtaaagtacttgaatgtaatattggggacattatggacttgattccagtagaagaaaaaacagattagaggtgtttatatggcgagtaataacaattcaaaaatcattagcgacgcgcatcctcatacaataaaaaaatttgagcttattgaaacatatataaaatcatgggctcaaaaacttatgctaaacgatagctgtagtggaatcgtttttattgattgtatgtgtaatagcggcgtataccgagacgatgatgggaaagaggtgtttggaacgccaattcgggtagcaaatgctcttcttgatgttgcaagaacgtacactgataagcaggttcatttattctttaatgattatgatgcaaaaaagattgaagtattaaaaaaacatttgcctccagaagaacggaattacataattgtcactaccacacgtgatggaaatgaactgttaaaatggattggccctcagttaaataaaaacagtcatatgcatttcttccttttatatgatccatatgatgcctctatagattggaatgctttactgccatttttcaggaattggggtgaagtgcttattaatcatatgatatcagattctgtacgtgcaatttcgcaggtaaagaaagaagacaaaaggaagaaatatactggaacgtatcaagttgaagatatatccgagctagttccttatggcagtgataaagccgcatatgaaaagagactacttgaaattatagaaaagatgaaaggtgcatcatcgagaacatattatgttgccgcttttccttttttcaatacaagaaactctttagtgtatgatttggttcattgtacaagtcacgaaaagggttttaagttgttcaaatctacagcatggaaaacatttggagataaatcttctacaaaaaataggcatggaatggaaggacagctggtactagattttacaggcaccggtattgtcaaaacaaatgttgatgaatactgctatgatttgaatagcatggctttatatgttcaggagcattttcatggggaaaaagacgttccgtttgacgagatttggaaactacttgataaacacccagtatttccgtcagatggatatagaaatcaaataaaagcaatacttagagatcactatcatgcggtggtaaagaaaaaaacaatatcattttcagaggggagaggttaagacatggcagaaatagactgctatatacaacgtaaaactatgctctacaaaacgggtgtagagtatggtgattacacgatgaatttcgtacaaggctgctcccacggatgtaagtttccttgctatgcattcttacaaaagaagcgattcggtaaagtttcggattatgaagattggtgtaagccaaaacttgtttcaaatacgttaactctattggataaagaaattcctcggcttagagagaaaattcaatctgttcaactttgcttcgcaacagacccatttatgtatgggtatgaagaggttggagagatggcactggcctcaataaaaaaacttaatgatgcgggtattaaatgtactgttctcacgaagggacttcttccacgttcgttggctttgctttcaaaagaaaacgaatacggaatcacactagtatctttagatgaaacctatagagaaaaaatggaaccgggagctgcatcatatcacgaaagacttgctgcattgagaacgcttcatgatgcaggctgtaaaacgtgggtaagtatagaaccatatcctacaccaaatctgattgaacaaaatcttatggagttgttagaagcaataagtttcaccgataagattattttcggccgtacgaattacagcaaagatacaagttcttacaagggtcataaggatttttacaataaaaaggccgcagaggttatcgaattctgcgagtcgcgtggtatcaagtaccacataaaagataaaacaattacagaagaatgaggtgaaaactgtggcactattacaagaccttatccaacaaatagatgatactgcattaagagaaagaataatgcaggaaacagataaattggtaaaacagaagaaatttggactggtattcgaagagcatcttccggaatgcacaccgctttatgacctgcctatttcagttggaaagaaagtggcattgaaaacaggttatatgcgcgatatctatactgtcctgaaaatagatgagatggaagttttatgtgagagcagaaatacacatgagcaagttgctttttcaaaagaagaaatcgtagcagttgccgaatttggtgaacctatctaccctactctgaagctattagatactgttgaaaatgcgccggaaagcgatttgtggcataccttgattgaagcggataattatcatgcacttcagttattagagtatctttatgctggaaaagttgattgcatctacattgatccgccatataacaccggtgcgaaggattggaaatataacaacgattatgtagatagcagcgatgcatatcgtcatagtaaatggctatcatttatggaaaagagattgaagattgcaaaaaagctgttgaatccaatggattctgttcttattgtgactattgatgaaaaggagtatttgcatttgggatgtttacttgaagaaattttcccagaggcaaaaatgcaaatggtcacatcacgtataaataaaaaagcgtcaactcgagcgggacaatttgctcgatgtgatgaatacatttttttgctgcagtttggaaaaatgaatatacaaaaatccagatactctatgctggatgtggttgacaatagtaatccggatgcgaaagaagtcaagacagacaccatttggaatagtatgttaagacgaggatcaagtggttcatcaagaagagagtcgcctaatttattctatccagtatgggttgatgaaaaaaagaagaaaatagaatacgtaggagaaccacttttattagaaattgataggcatgatattgaagtaatgccgcctaaaccagggttgagggcagtatggccaataaggactgataacagtgagggaagatggcaactcggatatgaaactctgcgttcatacctggagcaaggaattgcaaagttgggcgcctataataaaaaacgagatcaatgggctgttttatttttgaagaaaaaacaaaaagagcaattgagagacggagttcttgtgtccaagggacgcgatttggatggttctctgattttggaatggaacgaatcagcagaacaagatagagagccaaagactatgtgggtacgtgattggcatgatgcaagtacttatggtactaatttgattgaaaaaataataccgaaaagaaattttccgtttcctaaatctctttatgccgtgcaagatacgttgcgtttctttgtcgctaataaaaaaaatgcgcttgttgtagattttttctctggatctggaactacgttacatgcagttaatcttttgaatgcagaagatcaaggaagacgtagatgtattatggtaacaaataatgaagtgtcagaagatgaatccaaggtacttaagaaagaaggattccatcctggggatacggagtgggagcagcatgggattgctagatatatcacatggcccagaactgtgaatgccattaaagggtgcgattgtaatggtatagcattaaagggagattatttaggaaccgataggtctatggcaactggctttgattctaatgcaatattttttaaattacgttttctcgacaaaacatcagtagcccttgggcgacagtttaaagagcttcttcctgtgttatggatgaaaggcggagcaattggaagatgtccggctcttgaaatagagaggttgcctaatatgatggttctgcctgaaaacaaaatggcgatacttattgatgaaatctattatccggagtttgatgcagaaattgcaaagcaccctgaagtaaaaacggtgtttattgttactgactccgaaagtgcgtaccgtgagatgacacgcgcttatgacggtagagattgctatcagctttacagagactatttggacaatttccgaattaatacagggaggtaaccatgagggttgaattatttccatttcaaaaaagagctctcgcagatattcgaatgaaaactgcagaagctatgggcagctaccatagaacacatgctccacaggtagtttcctttactgcgccgacaggagcaggaaaaacaattattatggcttctctgatagaaagtattttctttggcaatgagaattatgaagaacagcagaactcaattattatttggctttctgattctccgcagttgaatgagcagtctaaaataaaaattgataccaaagccgataagattcgtcttggacagtgtattaccgtaagcgaggattcttttgatagagaaatgtttgatgatggccatgtgtattttttgaatacacaaaaattgtcaaagacatccaatcttactaagaatggtgacggaagaacgtatactatttggcagactatcgcaaatactgtacgagaaaaaagtgatcatctatatttcattattgatgaagcacatcgtggtatgcaaggcagagaagctgggaaagcaactacaattatgcagaagttcctcaaaggtagcgatgaggataagattcctcctatgccagttgttattggtatgtccgcaactacacagcgctttaatacacttgtagaaggtacatcttcaactattcataaatctgtagtaactgcagatgaggtgcgtgcatcaggattactgaaagatagaatcgtaattacatacccagaaacaggatctgtaaataatgatatggcaatcttgcaagcagcagctgatgattggaaagaaaaatgggagcattggacacagtactgctatgaacagcattatgcttatgttaatccggtttttgttattcaggtgcttaacggaacgggctctcgactaacagacacagacttaggcgattgcttaagtaaaattgaagaacgcataggttttagatttgaaaatggtcaggttgttcacacattcggtcagacttcatcatcaatacaagtgaatggtcttgatattcagtatgtagaaccatctagaatttctgatgatagaaatattcgtgttgtgttcttcaaggagaatttgtcaactggatgggattgcccacgtgcagaaactatgatgtcatttaagcatgcaacagatgcaacatacattgcccagctacttggtcgaatggttagaacacctatgcagatgcatattcaggtagatgatattttgaacgatgttcatctatacttgccatatttcaatgaaaatacagtaaaggatgttgttgacgcattacaaagcgcagagggtggagatattccaacagatatttatggtgaatctctgaccggaagaaagtttgaaaccttaacggttaagtctagaaagagaaaagtagatacgccagttccgggacagttgacattagatatgtttaactctgatactggtaagattaatgaaggtgagaatcatcaggataatgaaaccgaagaaaaaacgaaagtttcctctttggaaaatacatcagtgattcagaccacaccagaaacaacagtagcaccaaagccgacaattggaggatgtcagaaggtggactccccggaatatgctgatgcttcaaccaattttgaaacatcaaaaccatgcgaaaatgaaaaagctgaagaaattgaggtgattctagaaaccgcagaaggtgtagaagatttatttgatcgtgaaggtgttatgaagttcattaatgatgctggtttgctttcttacaatgtgcgagcaataagaattagcaattatctgaactccctatttaaaatggcgcatttgcttaccatgtctggattacgacgagaagcgattcgtgaagttcaaaccgaaattgctgacaagatacacacatatatagaaactttgaaaagcaatggaacctatgacaagcttgttttgcaagttaaacaatttaagcttgcaacgcagattttcgatgcttttggagaaactgttgacaatttctcagtacatgacctgtttacaactactgatacggatgtggatagacagttccgcgctgctgaggttaaattaggtaatgaaggtattggaattgtatacggtaataggtatatggacgatgagcatccgaataatttcaagattgatgtgattttgtttgttgctgatgaagaatgcataaaacagttgaatcattatgctgaaggacgttttcatgaattgaatgatgactatcgccgatatattgctacgattaattctgataagattagaagacagtacgatagcattgtatcagatggagatattgttagtaagcataatttccgtttacctgaaacgattcaagttcctcatgaagatggtggtaaagagtatcgtaatcacttgtttgttagtgatataaccggatatgcaaaaatgaagttgaatacatgggagactggagtaatcgaagaggaagagaaacaaagtgattttgtgtgctggattcgaaacccgtccagaggttcttgggcattgtgtattccatatgaaattgatggcgaaacgaaaccaacatttccagattttatcgttgtaagaaaagatgatattcttggatatgttattgatattttggagcctcacaatccggaatttaaggataaccttggcaaggcaaaaggttttgctgaatacgcacgccagaatccgggagtagggcgaattcagcttattcgaatgggaaaagatgcagttggtaagaatcgttttaagcgtttggatatgtcaaagagtgctgttcgtgataaagtttctcacgcgatgacgaatgatgaactagaccatatttttgatgtcgatggattttttatgtaaaagtggtgaacaaatgacaatcatcgaatacaagaagtgtgtatatgaaatccggggtactgaagttatcttttcatgaaaggacaaggtggtgtttatacattaaatcagtaccttaagaaaggataagctgtttgaataaaaattttactgataaaaatcagattatcataaaagggactaagttttagtctcttttattttcttgtattattttatttgttcatgtagtataatataaatgaaaatagcgaccaaataaaaagaggtggagaatatgtaccaagaaacagctgatgttgagttaaagagagaactgaccgatgcagtaaaagcagaaattgttgcttttttaaatacgatgaatggaacgattttagttggtgtagaagatgatggaagtctgtatgaaccattccaatccgttgataaggattatttagataccaaaatatctaattggttacaggatacaatttatcctttatcaacaaatttggtaaagcattattttaatgatgatggagttttggtaattgaaattaaagaaggcaaggataagccttattacttacgggaaaaaggaccgaaacctgccggtgtatataaacgagtaggtcgtagtatcagaaagtccacagaagatgaaattttaagaatgattatgttatcaaaaaattacgtttttgaaaatgatatttctgaggaacagaaccttacctttgaatctttgaaaaaagcatttgaacaaagcggaatagatttaacagaaagaaatatggtttctttgggaatactaaattcaagtaatcaatatacgaatctgggatttattttgtctgaccagtcagatataacaattaaaattgcagaatatgatgaaaatagaaattttaagttgaagaaacaatttaccggttctttggtggagttatttcactatgcgaaagaacaagcagatagattgaatgatgtatcagcaaagatagatataaaaacctttaaaagaaaagaaacggtttcttatccgggtgcttcattaagagaagtgatattaaatgcctttatccacgcagattattttatcaggtcaaacataaagattgaattttttgaagatagatgtaaaattaccagtcccggaggaatatttaatgcttctttagaagaaataatgaaaggcacgcaaacttatcgtaatcataaattggtaaacatatttgataagttggggttgatagaaaactttggtacgggaattccaagaacattggatgcttatgcgaacgaagaaagacaaccattgtttgaggcaacggaaaatttcttttatgttacattgcctaatttgaattatatttctgatgaccaaataaatgaccaaataaatgaccaaataaatgaccaaataaatgaccaaataaatgaccaaataaacgatatagatttagcgatccttcaaataatatttgaaaatccgggaataaaagttttgaatatttataatgagttattaaaagagcatccaacaattacaatggatcaaatccgaaattcaataaaaagaaaaatatatagatatattgaatataaaggctcaaaaaagacagggggatattttttcaaaaagtgaaaataccagtaaaagtgtcggtagttatgtcggaaatgatgtcggtaatttatcaagcacagatgaataaattgtatgacgtgaaattaagagcattcattttgaatgcgtagccaccgacaataagttggtgtttcaaggggattggggcattccccaacaagcaattttgagaatttgaagagaaacggaaaatcgaaaaatagtaagcttggacaagtttacactgcttgccagtttgtgaaaaccatagagaaacagttttgtactttgtgtatgaagctgttttttctttgctcaaaatcatcagagtaacataaaaaatatcagtagcccattctcagagagtgctaatccattctatgaggttataaaaaaatctgttcaagcagattacaatataagcatatacagatagatgactggtaatgcggacacaatacgtccggtattcggacacaccgcaccctcttaaatgtgtaataagagatttagaatatgattgtagatagaatgattgcgttaaataaagaaaaccttgccttagaggcaatagaaaccttgccagcaaggcaatttaaaatataagttcattcagctatgctttagatgaaagtaacgtaaaactgttacatttatatttttgcatttgagctggcaccaatggtgtcagtaatcagcactattgttccctgctgttaaagaagaaagttatttaaaataaaaatgtacctgttaaggacggataagacattaacctatcctcagaggttgggtaaccttgcctgtgaggcaataaaattatgaaataaagtcagttatactttaaatgtaattgagataagttctttgaaaattgaatattcattcatcagatacattcctgttgtgacatgaaaatgtcagccacatcagtgatacgccatgactgtaaaaatgaattgcggtaaaagataagcgattcaaaattacatgagcaagatttatcagcttgtaaatattgagtggcactcaatgaggcgatgacagcagcaggtataatgatacttctctacggagctggcggagaacccggcagaggtgaaatccctatggagctattacgctgatagccatctgatgttctacataatcgtggaaagcaatctgtctatacagacaatgagaaacaaaattattctctttcagattttacatatcagattgtgaaggtaggtatgtagaacggaggctttctatgagagatgaatggacagatttagcaaattttttgaaggaaatgattgagaagtattttgattccattgaccttagtgataaagaaagtgacatcattgctgcaaaatgatattcgcaataaaatgaagaaaagcaataaaagttgctaaggttaagcagtttgtgtggttagcaatccacacaaactcatacataacattgaaatatttgaaggaggcatggtgtatggaaatggtaaatgtttatacatataggcgagtatctacagcaatgcaaattgatgggtattctttggaagcgcaaaaaaacagaataaagatgtttgctgattatagtcaatttaatattgtgcgtgaatatgaggacgcaggacagtcaggaaaatccattgatgacagaattcaatttcaaactatgctaaatgatattgttacaggtaaagataacgtatcttttgtgttggtatacaaattgtcaaggtttgggagaaacgctgccgatgtactttcgactttacagattatgcaggactatggtgttaatctcatttgtgtggaagatggaatagattcatctaaagatgcagggaagctgatgatttctgttttatctgccgttgcagaaattgaacgagaaaatatcagaatccaaactatggaggggcgtatccaaaaagcaagagatggtaaatggaatggtggttttgctccgtatggttataaaatagttgacggaattctggaaatcaacgaagaagaagcggaagcaattagaatgattttcaacttgtatgccaatacagatatgggagcaaatggtgttgctaagtatttagaaaaccatggaatcagaaagattgctaggcagaatgggaagtatcctttattttcgcctcatttgattagagaaataatcaaaaatccagtttatcatgggaaaatagcatatggcagaagaaaaaccgaaaaagtacatggtactagaaatgaatataggcaggtgaaatcggacgaatatcttttggttgaaggtcttcacgaagcacttgttgatgatgagttatggaaaaaaacacaattaaagattgcgtcacaagcaaaaaaatatgaggttgtagaccgagttaaaaatcagcaaaaacatttattgtcaggaatagtcaagtgtcctatatgcggaactggaatgtatggtaataaatctattaagcataaaaaagatggtacaaaatataaagatttttattgttacggttgcaaacataggaaaatgatagatgggcagaaatgtacatatcggaagcagataaatgaagatgttttaaatggagctgtaatagagattgtatccaaggcgattaacaattccaaattgttatcaattatgaaagaaaaaatcaatacaaaaattgatacttctgaaatagacttggaaatcaataactatgaaaagcaattaagacaatttcagttattaaaaagtaacctgattagtgaaattgatatgctggatccggaaaataaacattatacacttattaagaatgacttgaatgagcgtttatattctatgtatgacaaaattgaagatgttagggaactcttgaatgatgcttgtgctagaaagaaaacgatagaggaggagaaattaacgagtgataatatttttgaaattttaatgcatttcgataagttgtttagtataatgagtaatgatgaacaaagaaaatttgtagaacttttaattgaagaaatacaagtttatgaagacagacaaagtaatggacaatggataaaaagcattaaattcaagcttcctattattgaagaaagttttgaagttggtttggacaaagaaacgcaagttgaaaatatagttcgtttgtcaaaatagccatgataaaaataattactaaacagatttcctaaaagaagtctgtttttttataatttatgacgagtaaattgatttcaattgttctaaatctataattatagtaaaattagataacctaataaaagcgggcgactgattgtgaaaaaatggtataatgaagaatatgaatttacaattgaagtaacagtttttacgtgggaataaagcagaacattattgctgtaatggtgaagaaattggtgataaatacacttgtacatatggttgctctaagaggtaatgatgatcatgtttccaattataggggtagttagattagaaataggggaaacaaaatgaatgcatttattttacttattccttttttattaatagcatttattaacgatggtgcaatcaaacgggctggatattttgctccactgcaaggcaatgagaaaatagcttatgtaatttatcagatggccaatatcggaatatttatatattttttcttatcagtaataattgatttatcttggcagttttgtttaggtctactggtttatttgttaggattgggaatgtgcattgttttggttaaagattttttctccaagaaatgatggcttaaatactaacgagatttaccgtttctctcgaaatccaatgtatatgtcatattttattttctttttaagaaccgtattattaacacaatcaataatcttatttataattttattactatttcaaatctctatacattgggttattctttcagaggagcaatggtgtatcagcaagtttggaattgcttatgaacaatatatgaatcaagtaagaagatatatatagttaaataaagaattataaaaagaacaataataaatattagtagcatacttatgatgtcttattgttgttttgaagtaatattaatggtatactgagttccagtatagaggtgcgaaaatgaaaatagagtttaaaatgtcttataaattaggattattagaatttaaagttggcgatcaactagaaattagtaagaacactatatttgaaagtataaatgataagtattatatgttaattttaaaaggattgcgttatgatcttcttaaagaagatattaaaattattcaataaaatatttaatttggctatatcttagtgattagccattttttgttatggaaaataaacttaaaataattttattatctgtgctataataaatattactaataaacatttaatatttaacaattattatttataaggaggaaatatgcaatacatatctaaatatacttcaccgttaggagcaataacattagctagtaatggtgaagcattaacaggtctatggtttgatggtcaaaaatattttggcgctaatttatcaaaagaatataagaacgtagagttaccagtatttaaacaaacaaaggaatggcttaacttatattttaatggtcaaaagccagattttattcctcttttggctcttcaagcaagtgaatttcgtcttgctgtatggcaaatattgctagaaataccatatggacaaaccctcagctatggcgacatttcagccgttttagcaaagcaaaaaggtttaaaaacaatgtcagcacaggctgttggcggtgcagttggacacaatccgatctcaatcattattccttgtcatcgagtcgttggaagtaacggaaacttaactggttatgctggtggtcttgaaaaaaagattgcactgcttcaattagaaggagcggatatgggagcgctgtttactcctaaaaaagggacagcattataagttaattaaacttaaaaatggaggcatttattatgaatgattttgtgaatcttattaaagatgaagttataaaatctccattttattatagtcaagggtaccaatatagggattggagattactgttttattaattttgattgtattttttagatttgaatataataaccttgagttaccatgtaagaaatatataatttatgcaataaattgtaacaaataaatgaatatagtataatatatttaaatattataggaaagaaggaatgtagtttatgaacaaagaagtattaaattatattgctgaaaagacacgtgaattgattgttgctccaacttgcagtaatgaaacaaaggaagctgcccaagcatggttaaatgcgattggaacagaaagcgaaatggctgagactaagaaatatatcgctgaattagaagaagatattatgccaattgataatttaattaggtttgctggttctgacaatggtaaagcttattttggtgaagaaaatgctaaaaatattgaaagccatgctaaagaaattaaagctaacggggctaaatattgcgattgtccggcttgtttagttgttgctcaaattcttgaaaagaagtctgaattatttaatgaaaaataataggtttatgaaaatattgttcctttaggaacaatatttttatttaaaatgtaaatcctttttacaaaaatattcttttttaaggattgatttgtaaaacctcttctaaatagactttaatgtatttaagtaaataaaatatgatgttaaattaaatgcaagaaaatattagaggaggagtttaaatgagagcagtaacaacaatatttcctgttatatttatgattggaataggaactttttcaagaataagaggttttattacaccaagtcaaaaagatggagcaaataaaatagtatttaatattttatttccaataatgatttttaatatcctttttacttctaagctagagacttcagctatttttattgttttatatgtgtttattgcatattgtgttattttgtttattggaagatttataataaattttactggggaaaaatttgctcatatttcaccttacttgttaacgacatgtgaaggtggtaatgtagctttgcccttgtatctatcaattgtaggggcttcaagtaatactgtaatatttgatttagcaggtgtttttatggcttttgtaattattccaattatggttgcaagagcgggtgctggtgaaacaaggattagggaacttattaaaacaattctaactaattcatttgtaattgcagttattttggggttaggacttaatttattaggtacatataattttttatcaaacagttcatatttaggaatatacagtaatacaatcacccaagtaacagcaccgattgtaggcgtaattttatttatcattgggtatgatttgaatatcaatatggaaatattgggagcagtgttaaaattgttagttgctagaattattttttatattctagtgattattggtttctttatcttctttccagggcttatgattgataaggtttttatgattgcagttttgatttattttatgagtcctactggttttgctattccaatgcagatttcccctttatataaaagtaatgatgattgcggttttgcttcggcaatcatttctttgaatatgataatcactttagtagtttatgctttgatcgttgtgtttattgcttaatgttagtattgttaataaatttttgatatggcataatgaaaatatattattattggagatagtttatggttatttgattttaacatatttttagtagccgtaagagaagaaaatatgactaaagcgtctaaattatatattcaatttagctgatattgctatggtggttgatgcagttggaagaagaattaggtgtaaaactatttaagagcaacaatcacagcatttatttaacagatgaaagaaaattgtctagtaacgggctcaagaaattgttaatttaactaaaaaggtgcaagaagaacttattaaagatgacatggctttatctggtgttattacgagaggttgtggtggaatgcaaagtattgaagaagcaacaagattaataactgataaaaaaagacttatcaataaaggagtattaataatatggatagtacaataaaattcgatggcctagcaaatctttatgaggatggtagaccggagtacccgactatattaatagaaaagttatatactgactatggttttaaatcaacatcgataatcgcagatataggtgctggaactggtaaattttcaaagctgttattagaaaaaggtagtaaggttttttgtgtcgaacctaataaagatatgagaaatgaattagtcaataaattaaataaatataataaattgcatgctatcaatggaactgctggtaatactacgttagatactagttctgttgattttattatatctgctcaggcatttcattggttcaatgttcatgagtttaaaagagaatgtaagagaatcttaaaattagaagggcgggtagcattggtttggaatgtacgagaaatggagtcaccattgaatcaagagtgctttcaaatttataaacagtattgccaaaactttgttggttttaatggcgggattaaacgcgatgatgaaagaataaaggaattttttgatatgcactataagcgtatggagtttccaaatcctttattttttgaccagaagggttttattaagcgctgtatctcaggttcatattctttaaaaaaaactgatcagaattattttgaatacattgctgccttagaaaatgtatttgataaatatagcaataacggacagttagtaatggagaataagacggttgtttatataggaagattaaaataaatgtagttcaatgtcaatgagaaatacttttatagctttaccattagttaaaggggcatatatgattatatagtcataaaagcgctttcttaatttaggcggtaataagaaggaagagatggccatgtaccatagattcccaactaaatatcttgaattagaattgactgaaacaatggtctttgcctaactagaagtttttagtaaaattattgagaaaattcattaggctggattcaactactctatggatgattttggaagtggctattcttttttaggaatataaaaagattcagatatcgttaagcttgatggtacattcttttcttctgaaacgatgaataaggggaaagaaaatattattgataagaaatagtgattaaatcactgaacaaattatttatagttaacattttgatagcattatcaaacattagatactattacattgattaaagctatattataatataattggatttaaaatttgagatataaatgtaagggagttaaaccatgggctttaatgatgaaagaaaacgaatgaatgagggtgaactttatcgttcaaatgatgcggaaattctaaaagaacaactacagtgtgtagaaaaattatatgattataatgtaacaagaccttcagaaaaacaaaaacgtaagggattgctaaaagaaatgtttgcagtgattggtgatggatgtcatattgaaccaccatttcatgctaattggggtgggaagtatgtacattttggtaaaggagtatatgccaatttcaatctaactttagtagatgatgttgagatttatgttggtgattatactatgatgggtccaaatgttacaattattactggaactcacccaattttaccggaattaagaaaagaagcatatcaattcaatcttccagtttatattggtgaaaatgtatggattggtgctggaacaattattttaccaggtattacaattggtgataatagtgttattggtgctggaagtattgtaacaaaagatattcctaaaaatgttgttgcttatgggcaaccatgcacaattaaacgggaaataaatgatcatgataaaatttattattataaggaaagaaaaatcaaaagtgtttaatatttttgatttttttatttatggattaaatacgtattactaataatattagtaatagctttaggtttaagctataatataaaagtataatgtaatattattgtgatccaatccaagaagatagtaagatgcttaaagaagcaaagaatgaggatttagaagcactaccagaactttatacacaatttgaaaacgtggttactgcttaagcattggaaagttagcccttgttcaatgactctaaatcaatatgcctaatcaaattaatattaatgatagaacaaaagaattcaaaataagaagatatttattttatttttattgcaatttttttattatcttatcattgttaaaggtgaaaatgcctagcactgagtctatctgtttataaaggtttatttaatagttgacagtaaaaaatagttagataataattagtaaattaaaattttgattgataaaggggagtatggtgatggagaatatattagtaattggtaacggctttgatattgcacatggttttaatactcgttacgaagattttataaatttttgtaagactattgcaacggtttatcaaggatttaaggataatcaattcatatatcaaaatgaatataatgatatattaaaagaaaaattagataaggtttttaaagaaaagtcggtttctgccaaagcaataaaatatttttcaaacttaactccaacatctgaaacttctcaatttatcaaagcatgtaaagaaaattattggcttacatatgtcttaaaaaataaaagtatgattggggataagtggtcagatcttgaatatgtcattgctaaacaaatagagatattatcatatatttcaaataatcttaactggcatactcgagaagaaactatgctcgcttcacgatattctagtaatttaattgaattatttaagattgtaacagaagaacgtggaaataataccgattttcagcatcagatagaactcacaaagaaacatttatatcgagaattggaagaattaacatggttattagaaatatatttaacacgatttttaaatactaaaaccaagaaaattgaattatttaaatatttaccagtaactaaactcatttcttttaattatactgatacgtacacaagaatgtataaaaaagaaacaaatacagttcattatattcatggatttgctgctaaagataggataaaagaagaaaataatatggtttttggaattggctcagaaattaaaaatgtcaccgataatgataagtatgattatcttgaatttcaaaagtattatcaaaggattgttaaaaaaacaggtaataactacactaaatggttaaatgacaatgaacaattttatatctatttttttggtcattccttagatattgtagatggagatgtaattagaaaactgattcattgtaaaaaagcaaaagtaattatcttttattataatcaaaaagccttgaatgcattagttgttaatttagcaaagattttaggaaaagatgaacttattcaattcactaatgaagaaaaaatcactttttataaatctgatgatcttgaaataattaaaaaacttaaaaatacaatgtatcaaactcgtcatgagaagcttaagagtacagttagataaatccaattagaaatgaggaaataatatggagaaaatcattaaagtgggaataggtgttttgttaatcaagaataatcagattcttttaggacatcgggtaaaagatggggttgatactggtggcatctatgaaccggacacatggtgtctaccaggtggaaaacaagagtatcatgaaactatttttgaaggagcaattagagaagttaaagaagaaactaatttaaatatctcacagatagaagtttttaatgtagtcgatgatattcaattaaataagcactatgtaacgatacatattattgctaaaaattacgatggagatttaaaagctatggaaccagataaacaagatgagtggtgctggtttgaaatagaaaagctgcctaataatatttattccccttcaaaaaaatttattgaagcatatttagatagaagtatcacctagataaatcttattataagaacgatatttttgaaatcattggcgttgaagaatagactaaatacattattaacaatgtggttaacacgtgtttatactattaaaggaaatattatgaataaatatacaatgataaaagaagttatttgaaaaacaacaagatattaaaaaagcagataaaacgtcaaaatatatgagagatttatttacattttatggaattccctcaccctagcgcaaagataagacaaatacaaacttgctggagcaaaaaattgttaatagttttggaagtgatgagttttttattaataaagcaattggctggagtttaagaaattattctagaactaatttggtatgggtaataaactttattattaaatatcgtactctaatgaataagctaagtattaaagaagctagtaaatatttataatttatagtgttgcatgtatttttttgatatttaagatggatataattgataatatacaaagttattataagaatatattttatgaaagagtatttcgcctgtaggtatgatttgttaatagactgtttattctgagagtctgacaaatcttaaagattgagacgcatatgagtctgttattttatatagaaaattttgtagttgtaggaaggacatatcctttaatatataccgaggaaaaggaaaaaggcaagacattatttgttgaaatactattaattggagttggactcgcaatggatacattgttgtatcaatttataaagcttaaggaataaaaaatagctaattatgctattggaagaattgatattagaaatacagttttaaaagaatattacctccattgattattgggtagtgttacttttttaactattattgatggaaaatgatttttgaatatttaggaatgcttgtatttttatatataagttaaaagaagggaaacatgacagtctctcttcttttaaccgttcattccaatataaataccaattatataaggaatcaaccatattgaccaaacgataatactaaatttatgaaaagtttttttagcacgatcatttttcttaattagtattactgttgcccaaactgcatgaaaagccattaaaagtaaagcaattgatccagtaatgccgtggagattaaaattaaaattgtgccctgatatttgtcccataatattcgttcctgatgtatcacaaataaagccaagccaaaatatcaaagcatgccattttagtaaactgccactctttttttcagcaaaaacaccgattgtataaaaaaccaatgctagcgtcatgaaaataattgccataatcagtaatattgacatataaatgtatttctccttaatctgtaaattctttttttaaagaaattaataatattagtaatgcaatcatcatagtaatatgtgaaagtcctgcaaaaccagaaagcatcttatctatcaaactatttatagccgtattagttatttgtagaatcccacgaattagcatagtgaggatcataaaaggtaaagaaaaattataaatgattacaaattttttaaatagtcgattattttgtatatttgttacttttgcaattacagctaggatgataaacagtaatgttcctaaaattaataaatgaggatgaattacacttaatacggtaggcattgaataagcataaaattttgtaaattcacgataaaaaacacccccagccattgctaaaataaaatatataatagcaatatttattaaagatttaggagaataatctaaagtcttatttaatgatttatagtaatttaaaccaaagatgataccggctaaaaatagcgcagctcctaaaccagtatagaaaatagcgataaatctatccggtaataaattaaatgttcgaattgttataccaaaaattatcataaatgccataataataaatgatttaagatcaaagaaatttaaaaagaattgtttttctatttcatagctatgaattctatgggtatgttttttagttaatttgtaaaatatagcaaaccaaaaaataataaaaacaatgattgagagaaagaaatttaataactttgtatatccaacatatgtttcaattccaatttttaaaatattgaaaccagcaataagccacacgattgaagctattaataataaattatgcttttttactttcataataaacctccataattaatctgaacactgttcactttgaattataagtattcccacttcgtaataagtgggctagtataaatatcgttcaactaactcaataataccttggtagttttgttgtggattaacgattgaaaaaatgaaaagttcaaaaatataatcaatgaataaagtttgatctaatttttgattaaaagcatcttttcttattttttgatctttttttaatacaattaataaattttgttttaaatggaaaaaatattttttcatcattttttgtccaacgactttatcttcagcagctaaagacattgcatgttttgaaagaaattcaggatattcttggctgccttcttgaatactttcaaataaccaagtcaaacattcaatgaaattcgtaaaactaaattgttcactagacatgtgaaaaatatctttccaaatactttcgatagtcgaacataagagttctgattttgatggaaaatagttatatattgcgcctactgaaacactacattcaattgcaacagaacgcatattaattgaagatagacctttttctttagctaaacgttgacagatagaaattatttcttcttttgatgttgatggtaaattcaaaatatttcctccttataattttatatgaaccatgttcatgttgaataatacgccttatttttataatagtcaaacataatgactttgcttttttatcaattattttaaatgaatctagagtttggctgattactattttatgttagaatgatagtatcaaaataaattatatttgaggtgaaaaataatgttgattgttgatggagaaaaatatcttgcggaaataaaagaattgattattgagtatacaaattcattgaatcgagatttctcttttcaaaacatagatgctgaattagaagatttaaaaagaagatatctatagtctcatgggcgtattttagcggttgtcgactgatggtaaagctgttggctgtattgtttattgtcaccatcgtaatcaatgctgtgaaatgaaacgtctatatgtaaaaccagattttcgtaatcagtgacaaggtcaaaaattaattgaagcaattattgaaactgctcaaggagatggttttggatacaatcaaaccgttaaaaagggcgatttcgttatataaaaaatatgtttttaaaaaaattgaaccacattatgataatccaacggatgacgtaatttatatgaaattagtattctaataagcaaagaaagtgagataggttaatgggaatattattggttaggcttattgatgtaataaatgaatatagtgaagatagtactttttatagtattgcttatacaatgcttttgaattttgataatttgcaaaatcttagtattaatgatgttgcaaatttatgtcatgtatcaaaatcaactattagtaagtttgtacgatcattaaattttgaagattattccgattttaaggcagaagcatattttaaggaaaatcgttttaacagtgattataattatgttgccaatatccaacaatatattgctaatcaagacgcaaatacctatattgacaaagttattcaggatattgaaataatcaaaaatattgatatgacagtgattagaaaaattgctcaaataatttatcaatatccaaaagtcacggcatttggaacacttttttcacaattgggagcgttagatttgcagtataaactggcctataatcataaatttattatgagttatgtaaatgatgttaaacaagacgaatacttaaaaaataatagtgaacaaggtgttgtgatcatttattctaattctggtaactatttaaataagtatcagttatcatcatttgatgaaaagaaaaaatacgactataaaaataaaaaggttattttaattactgcaaacgaaatgatggtaaatcatcccgatgttgatatttgtcttgtctatcagcatttatctaaattacaaacacatagttatatctatcctttgattaatgacttgattgttgctgaatatagaagtttccaaaatgcgaacttttaagtttatataaaaaactccgttataatagtagtatcaaaggaggaacaaagtatgagtagatttccagataattttttatggggtggagctagtgctgattttcaatatgagggtggatttggtgaaggtaatcgcggcttgattacagcagattttgtaacagatggtaatgttgatacgttacgtcaggtaacttataagtgtaaagatggaacgcttggttcgtcaccattaaaggctgaaattcctgaaggagcaactggatatattgatcctgagcgttattatccaagtcgtgatggagttgatttttatcatcgttataaagaagatatcgctttaatggcagaaatgggatttaatgtttatcgttttagtatttgctggacaagaatttttccgacaggcgaagaggctgaaggaaatgagttaggtttgaagttttatgagaatgttattgatgaattattaaagtatcacatagagcctttaattacaatttgtcatgatgaaattcctgcatatttagctgatcattatgatggatggtcatcacgccatacaattaattgctacttaaaattatgtaaaacattatttgaacgttttaaagggaaagtaaaatattggttgacatttaatgagcttaatgttgtaaagggttatgctcaaatgggaactcataaaattgatagtcaaacgcattatcaagcgatgcatcatgtttttgttgctagttcattggcaacaaaaatggctcatgaaatgatgccagggtgcatggtaggaacaatgtatgcaatgagtggtttatatccattaacttgcaagcctgaggacatgatggcacatatgaatactagaagattatcatatttttatgcagacactatggtaactggcggatatccatattatgcacaagcattatttgaaaaagaaggggtcgtactggttaaggagccaggtgatgatgatttactaaaagaatatccactagattttattacttttagctactatagaacaacaaccgttaatgctaacactaaattaaatattatcggattagcaatggatctaaatccctatttagaagcaaccccttggggttggccaattgatcctgttggattgcgctatgttatgaatgaactttatgatcgttataaaaaaccaattatgattgttgaaaacggaatgggtgaaatcgatcattttgaaaatgatacagttatagatgattatcggatccgatatttaaaagatcattttaaaaacatgaaagatgccattaatattgatcatgtagattgtattggttatacgatgtggggggctattgatcttgtttcacttagtaccggggaaatgaaaaaacgttatggttttgtttatgtagataaaaatgatgatggtagcggaacatataatcgatataaaaagaaaagttttgattggatgaaagaagttattgcaacaaatggagaaaagatataaggagggaaataaaattccctttttttaaattttaatcgggtctatttataatttaggttaatatatttaaaggaggaatgattaggaggaatcatagatgtgtacagcaataaagatatattcagataatggagatatttattttggtcgaacaatggatttttcatttgaattaaatcctgaactttattatattcctgcaaaataccagtggcgcaatgttctaaatactcatgatattgaaaataagtacaatattcttggtatcgggcaagatgtctctcctgttgctttaagtgatggtgttaatgaccatggatttgcagttgcggcattatatttttctgggtttgctcaatatgatgggctaaaaaaagataatacatcaattatcccgatcgctgcttttgaactagtttattttttattaagtcaatgtgcttcagtaaaagaagctcaagaattaataaaagtcatcaaaattattggtgtagaagatagtattacacatatagcagctcctcttcattggataataagcgatgcaaataacaattgtatggtgattgaaaaaacaatagatggtctacatgcgattaataatcctattggtgttcttgcaaatagtccagatttttcttggcatatgactaatttacgaaattattacaatttatcgccatatcaatttcaagaagcaatatggaacaatataaaacttactccatttggacaaggtgcaggaacattaggtttaccaggggattatacaccaccatcacgttttattagagcagcatttcaaaaaacatatacagatattccaattgatcgtcatcaagctgtgataacttgtttccggatcatggaaacggtcagtattcctaaaggggtcgtcattacagcaaatcaaacttctgattatactcaatatacgatgtttattaacttagcaactcgagaatattattttaaaacatattggaataatcagataacaagagttgaatttcctcaatatgatgaaaaagatatgaaaatgctttcattaggaccgttaaatcaaacgattgaatttaaaactagaagtatttttttataaaaggatgtgttgttagatacatctttttttgtttatatttatgattattgtgaaagaataaaatatgcttaagcatattcgttgaagataatcgaatgactatgctagaatggcattctaaggatgtgaaaaaaatgttgatacaaaaaagaaatggtctttttcaagactatgataacaataaaatagaaacagcaataaaaaaagctttttgcagtttatctgaaacaataaaagatgatgaattaaaaaagatgattgcagatattgaaaaacatattatagctgatatgtctgttgaagcaattcaagatttggttgaagaaacattgatgaaacatggatatcttcaagtagcaaaagcttatattttatatcgtcaaaagcatacggagcagcgattgataattgatgaactgcttgccttattgggagatcaaaatctaaaaaaggttctattgaagattcacaaagactatcctcaagaagaatattcattgcaattattattagtgaaatttaaaacattttataaagagggtatgagtcattttgaagcgttgaaaatgttgatgaaagcgagtgtggaattaattagtaaagaagcacctaaatgggagatgatttcagctcgatttttaacttatgatgtaaatcaacaggttgaccaaaaaatgaataccgctggtagatatactttttatgagcggattaactatttagcacaacaaggttattatggacaatatattcttgaaagctattcaaaagatgaaatagacatgttaggacagtatattagcgaatcgcgaaatgaattatttacatatagtggtcttgaattgattgttaaaagatacttgattcaaaatcatgaccgcgaaattattgaaaaaccacaggaaatgtttatgtcaattgctatgcatttggccatgaatgaatcaaatagagttaagtgggcaaaagagatttatgatattttaagtactttaaaagtgacgatggcaacaccaactatgtctaatgcgagaaagccatttcatcaaatgagttcatgttttattgatactgtcgatgattcattagcaggaatatataaaagtatagataattttgctaaagtttcaaaaaacggtggtggaatgggactgtattttggaaaagtacgtgctaatggaagtagtatcagaggtttcaaaggagcagcaggaggtgtgattcgatggcttaaacttgtaaatgatactgcaacagcagtagatcaattaggagttcggcagggagcagcagcagtatatttggatgcatggcataaagatctacccgaatttttacaaattagaacaaataatggcgatgatcgaatgaaagcacatgatatttttcctgcggtttgttatccagatttattttggaaattagctaaaaatgatttggaagcttcatggtacatgatgtgtccacacgagatacatgaagttaaaggttattatttagaggattgttatagtgaagagtgggaaaggaaatattatgagtgcgttgaagatgaccgaattcctaaacgcgttatgacagttaaagaaattgttcgtttaattattaaatcactagttgaaacaggaactcctttcacatttaatcgcgatcatgttaataattttaatcctaatcctcatcagggaatgatatattgcagtaatctttgcacagaaattgctcaaaatatgcaagcgatggagatcttaccgtctgaggaaattgaggttaatggtgaaactattattgttgaaaaaacaaaaccaggtgattttgtagtttgtaatttagcttcattaacattaggtcatcttgatgtcttaaatgatgatgaattgagacacgttatcagtgttgtaattagggctttggacaatgtaattgatttaaattattatccaattccttttgccaaaataactaatcaaaaatatcgtgcgattggattaggaacaagtggttatcatcatatgctggtaaaattgaaaatgtcatttgaaagtgatgagcatttacagtttattgagcagctttatgaaaagattaattactttgcgttggaagcttcatgtgatttagctaaagaaaaaggaagttactcattgtttaatggtagtgattttgaaacaggtgcatactttataaaacgtcgctatcaaagtaaagcatggcaaaatcttcaagctaaaatcaaagaaaatggtttaagaaatggatatcttttagcgattgccccaaccagttcaacttcaattattgctggaacaacagcagcggttgatcctatcatgaaaaagtattttatggaagagaaaaagggaagtatgattactagagttgctcccgacttagattctgaaactttttggttatataaaaatgcgcattatattgatcaagagtggattgttaaagcagcgggaattaggcagcgtcatctcgaccagtcacaatcagttaatttatatatgacgaatgagtttacttttagaaagttgcttaatttgtatattaaagcttgggagtatggtgttaaaacattatattatgttagaagccagtctttagaagttgaagaatgtgaatcatgcagttcataggaggtaataatggaacttaaacaaaaagcattatttaatgctaaaggtgatattgatgtaagaaaacgtcgaatgataaatggaaatacaacaaatcttaatgattttaataatatgaaatatcagtgggtcagtgattggtaccgtcaggcgatgaataatttttggattccagaagaaataaatttgactcaagatattagagattatcgtttgttaagtgaggcagaacgaaccgcatatgataagattctttcatttttagttttcttagattctttacagacagccaatcttcctaatattggtgagtatattacagcaaatgaaattaatctttgtttaaccattcaagcatttcaagaagcggtccattcacaaagttatagctatatgcttgattcaatttgttcaccaactaaacgagatgaaattttatatcaatggaaatttgatgaacatttgttgaagcgaaatgaatttattggtgaacagtataatgcatttcttgaacataaagatagttttcatttaatgaaaacgattatggctaattatattttggaaggaatttatttttattcaggatttatgttcttttataatttagggcgaatgggtaagatgtcgggatcagctcaagagattcgttatattaatcgtgatgaaaatacacatttatggttatttagaaatatgattattgagctgcaaaaggaagaaccgacattatttacccctgaaaagattgaggtttatcgtaatatgctaaaacgtggagttgaagaggaaattgcttgggggcaatatgtcttgggaaatcgaattgagggtctaacgatggatatggtcagtgattatattcattatctcggtaatttaagagcattttcattgaattttgaaccattatatgaaggatttgagacagaacctgaagcaatgaaatgggtaagtatttatagtaatgcaaataacattaagaccgatttttttgaagcaaaatctactgcttatgcaaagtctagtgctattgaagatgatttatagaatatttagaaaagcaagatagaaaactaccttgcttttttgattgatctattgttcagctatttgatgcataaatgtttattagaggaggatatattgatgtatagaataaaaaaatccgttattattttcttcgcttatcgcatttattgtttgcctgatctatttattaatatctatagtaatagcagtatattataatctatggaatggtctattccttcattcttattgtaattcagtcgtttttgtgttttgtttcctgtgataatgatgagtaattttttatacaccgctatatattttattttcaaatattaatgtggatgtatcattggataatttagctttgttttcaccagttgtctcgagcatgtacttaaatatcattatgatagcatcagtaggaatcatcggttatataattttacagtctattcaccttaataaacagccacctttaattactgtctttagtatttcagcgatgcataggtgctattttagtgattttaattttattttgtcaaagctccgatgctattattaaggcgtgaacatgaagctattgttaatcatcaattatgtatcactaatacttttgaacaggtttttaaagaaaaaatgctaaaactttataaaaaagttcggtatctttgtaatactcatggatatccttttactaaaaatattcattcaaaatatcttgctgatttaatttatctaaaaatgaagcttctatgatactttttactgattatctatctggtagacagtaagcttaaaaactgtattgcaatgtgatatattaaactttgcctaaaaataataactatgctagtaatagtttatttttttattatatatttgtttgacaagtctaacaccaggagataagatataattgttggttagattaggctaactattataattgttttaattgaaatatttagcattaaatcctattttaaaaagattatagagggtgttgtgtggtgaatcggataattctattcaaaaaatcaatttgtaagattgaaaaatgagaattatccatattgtgtgatgatggaaattaatgggatgagttgtaccgattgtcagcaacaaattgaaaatgagtttaatcagaagaaaatttatttagaacagcatttggctgtacttctaccaaaacaagatgcaagtgtggaatcagtctaggtcttaataaagttagttggctatcgtgttattaaataaaaaaaatctgaattaaaagatagggggatttatatgtatttgcaattagaaaatgtagaaaaatattatggtgaaaatgaaaatcgggttcaagttttaaaaggagtcaatggttcaatagaacgcggtgaaatctgtgttatgctaggaccttcaggctctggtaaatcaacattattaaatttaattggaggtatcgaaataattgattatggtaatgtgatagttggtggaattgatttagcatctttatcaaaaacaaaattagggttataccggcgggatactttgggctttgttttccaattttatcatctagtcccaaatttaacagtaaaagaaaatattgaaacaggtgcatatttgagtaagacaccactagctgttgaaacactattagataaattaggattaaaagaacattgcaataggtatcctaatcaattatcaggaggacagcagcaacgaactgcaattggtcgtgctctagcaaaaaatcctaaattattattatgtgatgaaccgacaggagctttagattatcatacatctaaagatattttagaattattagaacagattaatcaggattatggaacaactattttaattgttactcataatgatgcaattgctaaaatggcacatcgcgtgctgcgtttgcgagatggacaaattatttcaaactatttaaatacatcacgaatcaatgctaaagagttagaatggtagtagggtgttagcatgaaaaatccattaaataagagtttaaaaaaagaattcactgataacttagctcgttatctagcacttgctttggtcatgatagttatgattgcaactgtttcaggtttttttagtgtagcttatagtgttaataatctattaaaacaaaatcaagatgaatgtttagtcgaggatggacagtttactgttttaaaaccattgactaaagaagtaattaaagaaattgaaaaagagcctgtaaaactttatgaaaatttctatagcgagcaaaagatcaaaaatagtgctacattaaggatatatcaagatcgtgaaaatattaatttggttacagtttaccaagggaaactcccaaaaaagcatcaagaaatagcattagatcggctttttgcaataaaaaatggttataaaataaatgatcaaattaaggtcaatggtataaagttaactatcgttggatatttaagcctacctgactatagttcgttgattaaggataatagtgatttaatgatggatcctatccattttggagttgctattgtagatgagtcagattttgctttattaaaagagaataatattaattatacttatagttataaatcaaatgatgatttaagtagtaaagaaaattacgatcaattaaatcaaattagagatatcgtagttgatagtggatgtagcttaacaggaatgatgacccaagagatgaaccaggcaatatcatttttacctaatgatatgggtggtgatatcccaatgatgaatatgttgttttatatcattttggttattttagcctttatttttgttgtaatttcacaggcgataattgaagaccaagcaactgcaattggcacattactagctaatggttatacaaaacaagagttgattcaccattatcttactttagtaatgatcattgtttttgtaagtggactagtgggaaatgttattggatatacaataatgccttcatttttttctaatatgtactataacagttattgcttgccaccattacagttaaaatttattcctagtgtatttgttaatactaccgtgattccttttttggttattttgatagtcaattatttaatgttatggcataaattaaatatttcgccattaaaatttttaagacaagatctacatgaaaataagaaaagtcattatattcatttaaagcaaacgtcgtttattaagcgctatcgtcaaagagtgattcttcaaaataagggaagttatttggttttaatgattggaattatttttgctagttttcttttaacttttggtttttgtattaccccgtcgattgaacgttatttagaaaatatggaaaatagtattaaaacaaactaccaatatcttttaaaggtaccagttgaagctgctggagaaaaaataacatatacatcattacaaacctattttgctgctggggaaattgacttagatgtttcattctatggattagatgataattctatatattatgcggatattgatttgccaaaggaaaaaggtcaaattattatttcctacgattttgctaaaaaagttggcttagaaaaaggagataaagtaacgtttacaaaccaatatactgaacaagaatatcagttaaaggtttttgatatttataatagccgaactaatataagtgtttatatgtcacgtgaatcattaaataatttactcgaagaagatctgaattattataatagttatttatcagatcagaagttaaatattgataaaaaatatcttagtacgatgattactaagacagatatgctgaaaattggtgatcaaatgacggaaaccttttcacagatgattccgattatgagtgggatagcgatagttatttatttagttgtaatgtatattctaacaaaactagtattagatcgaaatactaattatatgtcgtttttaaaagtgataggctataacagccaagaaattgctaagatatatcttaaagctacagctttggtagtagtattttcattattgattagtttaccaatttgtaaatatggtttagaaatattgtttattcaagcaatgatgagatttgcaggatatatagaaatctatattccaacctacctctatgtaatgatttttactgttggcttaattacttattttgttgttaattggctattgaataaacaaattcaaagaattgatttagggaaatctttaaaagaaacagaataactataggttattctgttttcacctaaaaggaggagattttaatgcttgaagatattaagctgccgtttatagataaaaaggttattaataagcatgaaagagagtatcaaataggtttaatcgatggacagggagtaatgacgagcatagatatttatccagggatacaagttatatataataattttcattgttttactgctccgactgatcaatctctcaatcggcatcgttatattgaaattaatcattgtctaaaaggtaaatttgaatgtcagtataataaaaattattatgcatatttatgtcaaggagatttagcaattagtggtggaacattaaataaattaactcactcatttccattgggttattataatggtgtagaaattttgattgaagtagaaaaagctaaagagaataaattattagatgaattcaatattgatattgatttaatcagtaaacgtttaaaagaaagccataatgtatatatttttcgtgctactgctcaaattgaacatatttgtttagaaatgtatgagatagaagaggaattaaagaggaattacctaaaaataaaagtgttagaactgttattgtttttatcacatcatgactttggaattttagaaaatgaaaagcattattatccaaaaaaacaaattgagattatcaaggcaataaaaacagagcttagtaacaatatttcagctaaatatgatcttgaaaaactagtaaaacaatacaatattaatattcatacatttcgtaaagcatttaaagagattcacggtaaaccaatctatcagtggtataaagaatatcgtttagagtatagtttaggtctactgattaataccgatattccaattatcgaaatagctaatgagattggttattctaatccaagtaaatattcagctgcattttatcaatatacttctatgacaccccagcaatatcgtaaatcacatcttaaaatggagcaataataacaaaatggagtagcagtaataatatttaggagttatactctcttataaagttagtctattctaactaaaggagggttaatatgacagtattaaaatctttatttgcttatgctggcaaatataaatatttaacaatactttctttagtattttcaatgataagtgctattttattattaatgccatttattatgatttggaaagttattgaggttattttggcagagtatccaaactttgcccaaggaagtattgcgatacaatacggctggtacgcgttaatttttgctgcagtaggaattttattgtatgtttcgggcttactttgctcacatttagctgcatttagaattgcttcaaatatgcgtaaaaaagctttacatcatgctgttcaattaccacttggatattttgctaaagaaggaagtggtaaattaagaaaaattattgatgaagctgcagcttcaacagaaacttatttagcacatcaattaccggatatggcacaattgattactactgtttgtgcggtaatagtctgtttatttatttttgattggaagtttgggatagctgcactaattccaacgattttagcactatcaaatatgtttaaaatgattggtcctggcttacaggaatcaatgaaagcatatatggatgcacttgaaggaatgagtaatgaagcagttgaatacattcgtgggatacctgttgttaaaacatttcaacagacagttttttcttttgatcgttttcatcaatcaattaataattatgaaaaatttgcaattggttatacaaataagatgcgtttcccaatgactttgtttacgacctttatcaatagtattttcattttcattattggcacaatgatgttattgatcttaaacggttttgatttaaattctttaatgccagatttcttattttatgttatttttacaccaattattgcagtaacaactaataaaattatgtttgcaagtgaaaatacaatgatggctgcagatgctttaaaccgaatcgaaggaattattaatcaaaagccgtttacgtataagcatagtctgcaagaaatcaccaatagtgatatcgaatttgagcatgtctcttttacttatccagaaagtgaaaatgaagtcattcatgatgttaatttgaaaataaaaagtggttctattgttgcttttgttggtaaaagtggaggtggtaaatcaacgctagtatccctaataccgagattttatgatgtgactaaagggactattaaaattggtggtgtcgatgttaaagaaattagtgaaaaagaattaatgagtaagatttcattcgtatttcaagacagtcgtcttttaaagaaaagttttaaagaaaatattatgatgggatcaaatgcaagtgttgaagatattcagacggcagttcataaagctcaatgtgatgatattatagagaaatttgatcaaggattagaaactaagattggtagtaaaggggtttatttatcaggtggggaaacccaaagactgacattagcacgagccattgttaaagatgctccaattttgttattagatgaggctactgcttacgctgatagtgataatgaagtcttaatgcaaaaagcaattatggaattagcaaaagacaagactacgattatgattgctcatcgactttcaacaattgtaaatgttgactgtatctatgttgttgataatggtgaaattattgagagcggaacgcatcaagaattattaattaaaaacggattatatgctcaaatgtggcatcaatattgtcagtcagtagaatggaaagtaggtgaacaagaatgataaaaaaggttcaagagcgttttgctttaacccatttgggagcagttaatttaattaaggcttgtgtttcatgtacgatatcatatttagcaatcgcaatgtcaattggagtgttatattattttacttgtgatgttttagaaatgctatatggcagttcaaatacaatcttatattcaatgtatctgattgaatttgtaatagttgttatcttaatttttatcgctcactatattcaatataatatgactttttataatacttataaagaaagtgcaagattaaggattcgtgttgctgaaaaacttcgaaaattcccgttaatgtttttttcaaaacgtgatttatcagatttaacaacaacaattttgtctgatgttacgggaatggaacaggctttatcacattttattcctgaattctttgggtcaatagcttccacacttttactatctatatcgatgttctttttcgactttaggatggctttagcagctgtttggtgtgttcctgtatcatttttattagtagttctagctaaacgaaaattaagtaatgccggatttaaagatcgtcaaaaacaattagttcgaactgaaaagattcaagagacgctggagacaattagggatttaaaagctaatcactatactcagcagtatcttaatgaggtagatcaggttattgatgattgtgaaaagagtcaaattaaaacagaacttacaaatgctttatttgtagttagttcacaattgattttaaaattaggaattgcaacagtagtcatttatggagtaacatcactaatcaatcaaacgattgatctgaaagtctttatgttatttttaattgttgcttctcgtctttatgatcctcttagtggaacattacaaaacttagcagcgattatcagttgcgatcctaaaattgctcgtctaaatgaaatagaaaattatccccttcaaactggtgaagaaaaattcgagccaagtaactatgatattgaatttaaaaatgttagttttgagtaccaaactaaaaaaaaggtacttgaagatgtaagttttgttgctaaacaaaatgaaattacggctttaattggaaatagtggtggcggtaaaacaacctgtgcttcattagctgctcgtttttatgaattaaacgaaggggttattaaaataggtggaattgatatttctacagttgatccagaaatactattatcaaaattttctattgtttttcaagaggttgttttatttaataatactattttagaaaatattcgcattggtaaaaaagatgcaactgacgaagaagtcatggaagcagctcaaaaagctttttgtgatgagtttgttgaaaaactgccagatggatataatacggttattggtgaaaatggttcaaaattatcaggtgggcaacggcagcgaatttcaatagctcgagcaattcttaaagatgcacctattattttattagatgaagcaagtgcttcattggatgttgaaagtgagacctttgtacaaaaagcgttatcacatttgattgctaatcgaaccgtcattatgattgctcaccggatgaggacgattgctaatgcctctaagttgattgttttagaagatggacatgtagttgagcaaggaactccagaacaattattaggtaaagaaggggtttatcaaagaatggttgacctgcaaaaaatgagtaacgagtggaaattataaaaactagcaagatattgctggttttttttgttagacttatataactttagattgactatgacgaaaaaaagagtattctaatagtatagggtgttagttttgactaacatctttataataagttaggaggaacattaatgaaagatttattaaaaaacaaaactgtattatcctttgtaggaggaattgcagcaacgattgctggtgcaaagtttttaaaaagcgataaagctagaacaatggcggttaattctttagcttcgggaatgaagctaaaagacgatgcgatggctacttatgaaacgatcaaggaagatgcaaaagatatttgttacgaagcaaaagctaaaaatgagggagaatagataggttatgaaagcttatcaaattgttcatgatatgcctggacgaatgcgaattcgttatggtaaatatactttttcaaaaactgcagcaattggattaagctatgaattagaacgttggaaaatggttaataaggtcgaagctaatgatataacaggaagtattttatttatttatgataaaaatagaagaagagaattattagctttaatacgacaatttgaaatagaaaaatttgatgtaacaccatatctagcgacaatcaaggagtataattcttatgaaataacacaaaaagaagttagccaaaattatacttctaaatttataaagttattgcttcgccgttattcaattcggtggtttttaccaactccgatacaatatttaagcagtatcgttttagcggttaaatatttcaaaaaggggctagcttcattaggtaaaggacatattgatgtgccagttcttgatgcgacaagtatcgctgtatcgatgcttaatagacagtttaaaacagctggcgatattatgtttttattgtcggtatcacaattattagaagactatacaagaaaaaaaacaactttacaattaaaagaatcattatcacttcatctagataaggtttggatcttagaaaatgagtcagaaatagaaattcctagtgatactctaaaaagaggtgatatagttattgttcacatggggacgatgatccctgttgatggagaaataaccgatggtcaggctttgatcaatgaatcaagttttactggtgagcctctaagtaaagcggttggtaaggatgatactgtttttgcaggaacaattgtagaagaaggaaaaatttatgtaaaagttagaaatctacaaaaagaaagtcgtattaataaaattgttgatatgatcgatgttaatgaaacattaaaagctggtgttcaatcgcgagctgaacatcttgctgattcgattgttccatttagcttttttggcttctttgggttgctattatggacaagaagtctaacaagagcgacttcaattttattagttgattattcgtgtgcaattaaattgactacatcaatttctatcatcagtgcaatgcaagaggctggaaaacattcaatcatggttaaaggtggaaaatatcttgaagcgatggctcaagccgatacaattgtctttgataaaacaggaactttaactaatgcgactccattcgttcaagaagtaacaccactagatgactacagtcgtgatgaagtacttagaattgcagcttgtcttgaagaacatttccctcacagtgttgctaacgcaattgttaagcaagcccaagatgaggaattgttacatcaagaagaacatgctgaagtagaatatattattgctcatggtattgctactaatttacatggtcaaagagcaattattggtagtgagcattttgtttttgatgatgaacagattgaaaaaccccctgaaatagttcagttgatcagcaaattacatagtaaaggagctagctcattgatttatttagcaataggtcaacgcctagcaggaatcattagtatttatgatccgctcaagccggaagccaagcatgtaattaataatttacgggagattggttttaaaaaggttattatgttaactggagattgtgaaaacgctgcagggcatattgcaaatgaactaggaatagatgattataaagctggtattttaccagaagataaagctgagtatataagactgttaaaagcgaaaggtaaaaaagtcgtgatggtgggtgatggcgtaaatgatactccggcactatcaagtgcagatgtatctatttcaatgcaagatagttccgatattgcccgtgaactagcagatgtgacattgacttcaagtcgtttggatgaaattgttgaatttaaaaagatttcgatattactaatgcaaagaataaaacataattatactaatatcgtggcatttaatagtttattaattttatctggactaattggattattacagcctaatacaagtgcatttttacacaatacttcaacattcctattttctgctgtctcaacaaaaccgcttctttataaaaaagaaaattaagcaagtagggagatttccttacttgcttttataatcaattgaattataagataaataaatgtctatactataaaaaattaataaatttaagggagaagtggttatgggagaagcactggaagattatttagaagctattttaattttatctaatcaaaataaagccgttcgttctgttgatttagcagtgtatcgaggatattctagggcaagtattagttatgcagttaaagagcttagaaataaaaattatttagaagtaaataaagatggtcatctcaagttaacatcgagtggtcaagtacttgctaatagaatttatgaacgacactgtttttttaaaaaacttttaatcgctgctggcgtaagttcaaaccaagcagaaatagaagcttgtaaaatggaacatggaattagtgatgacagttttgaaaagttgaaaacgttgttagatttttagcatggaatttttgtttgagtataaacatagatattgtaaaaattgattgaatagaaatttattaaaaaaatgctgttaatatgttttaaaataaaaagacaaaatcaaatatttttggttttgattttatccgttcatttatctgaattttaatggtatatatttttataagaaaatttcgttatttgctgatttcagcataaatgtgtaattgatgtagagaatgaatataatcattaagcacatgtaatcttagttgtgtatcaactggtaatgataaaaaatattcgcgagaactagaactgcgctggattaattcatgtaagttttgatatttaatgtcactcacctctaaacatatcatagccgttattgataaaaatatacaggttcaaaaacataatgatttaattgcataaaatagaaaaggaaatacaagcatattaaaattgcacgttgctagaaacattcatacgtaacaaatgtattttaaattatcctttattatctataataaaaaagagaaaaaaataaaggtgattataaaattaataaggaaaagtatttcaatagctatgcggttgaatccaaattggataatactgtttaatagtagaaagaataatggagctataaaatcaacaacagctgcaaagtcatgaattattgcttcaatcgtatctgggtcttttgttaatactaaagcattcagacaggagctcgcctccaaaggataatatcatgatggataacaccattagcgatacaataggaaatgagaaagattttaaaatgataaaaaatctaatggtaatataactaagaaaaattctaagccaaatcagctaaaaattataaattctttttacagggtctttagaattttctaatataccttattatcataaatctacttttacagctagaataaaatgattttaagatttctggtaataaaaattcaccaaaatcattattaaaagaatcaactaagtaaattgatgtataggtagtttttcataataactcatcactttatttaataattatattattttgttgattaacttaataaacaataaaaacatgacataagtcatgtttttattggctccagcctttggtattattacggacattgataaaatcttggtatattccagtttgtttgattaactggttatggcttccgctttgtgcaatttttccatcagctatgacaagaatcttatctgcgtagcgaatagtgtttaaacgatgtgctattactaataaggtttttccttgacataactgtgtaattgcttcttggatataattttcgttatcaccatcaatactggcagttgcttcatcaaggataataataggagcatcttttaaaatacatcgagcaattgaaattcgttgtttttcaccaccggaaaggcttgtaccaccttccccaataattgtttgaaaaccatttggcagtgccatgataaaatcataacaccgagcttttttagctgcttcaatgacttctttttccgtagcctcaagtcgtccgatgctaatattattatagatagtatcctgaaataaataaacacgttggaaaaccatactgatatgattcattaaatcagcaagtttaacgtttttgatatttgttccacggatgtttattgacccgctatcaacgtcccaaaaacgtgttaatagattagcaatcgtacttttaccgcctcctgatggacccacaagagcaagcatcttatttttttctaatgtaaaatttatattgtgtaatacttcttttttatcataagagaaactaacatttttaaattttatttctggtagatcactttgttctggaattacttccataccatcatcaggcagttctttttgagctaagacatcttcgacacgatccatacaactactcattacagttaaccgtgtactttgactatacaacgctttaagtggaccaaataagtcaaatacaaataaagttactccaatcaagtaaggaacagttagtaaattttgagtttgtagatataatgagagtgctaaaatagcagctattcctaaaccataaataatatttagccaacgttgccagggagcatgtgtttcttcaaattctaaattagttcggcagctctctttaaaattattagaaagttcagctgatttttcacctaacagattataagttttaataatactaataccctcaataaaatcaagtacagcattagtgagtttttcactttgttcttgtctgatagttgaatgttctaatgtttgttgttccatcgctttacctaaccataggattgctccagcaattaacaatgaaagtatccccaaccaaatatttaaatagaacataaagatgatcataataatttcagcaaaaatatagctcatcatgtcagcaatcacggtcatacaattttcttctataaagaccatatctgtagataatactgaactaattttcccaatatttccttcagtaaagtaacccattggcaattttctaagatgacggcctaattccatgcgcatatctgaaaaaattcgataaccagaatcaccttgtaaacgatcagaaatattttgaaaaactgcttgaaataaaacacaaactattaatgtaataccaagcagaaaacataatcgatcagacattttattattataaaaagcattaaaagcaataaatgctagtccgattggggattttgctaacattgattttaaaaacgagaaaataaaagcgattttaatattgcgacgatattttccggcgatagcaaggattcgtgacattaatgagatcataattaattacctccttgattatgactaactctccaattagcactattatttgccatggtccataacttttggtattcaaggcaagtatctataagttcttgatgagttcctactgcgtttaaatagccattcttaagtacacaaatctgatgtgcattgataattgaatgtagatggtgggcaataacaataacagttttatctttgataacttctgcaattgcggcattcattttttcttcattttctggatccataaatgcagtagcttcatcaagaacaatgattggagcatctttgagaattgcccgagcaagagaaattctttgtcgttcaccaccggataattgttttcctccatcacctgccaaagtatgaattcctaattcaagacggcttaaaaattcatcacactgtgctttactagctgcttgataaacttcttcatcactagcatcaagccgtcccattctaatattttccatcaaagttgtattaaatagaaattgttcttgtgaaacataggcaatttgattatttaacgtttcaatgctcatttgtcgtaaatcttgatttcctattttgatcgaacctgaatggacatcataaaaatgaacaagcagttttgctaatgtgctttttccacttccagattccccaatcaaagccgttagtgagccttctttaatttctaagttaatattatgtaaaactacattattattgtatgcaaaactaacattatcaaagctgatatgatggtttctgtctttaaaacaatcagatgtttgttgtagtggcggtgcacttaacattttttcaagagactcaattttataactgatttgtggtaaagttgagacaaacgccaaagcccgtaaaagcggagtaccaattgcgaatgataagcaaagaataagaactaagtcaggtaaactcgaatagttgtgaagaactaaccaagatccaaatggtagagtaagtaaagctacacacggtaaaatactattatagagtgccatccatggccaacaagctttgtaccaggcaagagtgaaatcacgatatccacgtatatcattttcaaaacgatgatatgattcaccatcgcgattgaatactttaacaacttccattccattaacatattcaataatagtattattcattttttgtgcagctacgtagtaattactcatttctttcataccaattttgaacattgcccccatcgctaataaaccaatgggaagagaacctaaagataataaggcaagtttccaatcaacaataaacataacaatatagatgaagaggggaatagctaagttcgagatgccttccggcaaagcatgtgccaatagtagttcaattgcttcaatatcatcaataaaagtttttttatgagcaccaactcctttttcttgaataactcctaatggttgcttttcaagtttacattgtaaagaaattcgtagatttttaatgtgtgatatgcactttggtgtgataaggcaagacctttaacataaaaaacggcatataagataagtgaaattgcaatggcaataactctaaaaataatataatgagtgcttatttgctgatgcatgattaaaggtgtaataatttgatagataaaaagaaatggtaagatattcattcctactccaatcagcattgtggcaatagcttgataagttttttttcgataatcaccagcgtattctaatacttttttaagcatgtaatcccttctttctggttagttttagctaacctaagttttttttaaaactcccatctagggagtttaacgtgtatatccaagaacttggtaccagttaaagaaatggcagacaatttggcaatgattctctatttgctcccaactaaaaccatggatgaatggctcatagatcgtagtccaaaaagaagatagtagagtatgaaattccgttttactgatttccgtagtaaaaattcctcgatttttagcttcaagataatattcataagtatagatggacattttttcaacccagtcgtgagtaaaattagaaaaggaagtaccttgtgagcatgatagtaatagaataaagccatcataatggctatataaaaatttaaaccaccataacattacatcgttattcatattccaggcttcaattaattcaaattctgtaactgtttcaaaattgatcctacggttgtcagcgacttcatttaaagcttctaaagtaggggtaactactgctgtaaataattcctctttacttttatagcgtttgtaaagtgcccctgtagtaacctttgcatttgcacagattgttttcaaagaagctttctcataaccttgtgataaaaattcttctttagcactttttaaaattcttggatcaatagatttatcgggttttgacaatttatcgcctccttttatactgataattaaattatcgataatctaattatcagtataaaagtaattgcacttgatgtcaatcgttacaataaaattttaggttgaaagtaataaatttgtttttataaaaatttaattggaataaataaaaaagccaacttttgaataatgtataagttgactttttgaggattatttaatttagaggtatttcaagtatatgtgctttattgatgataacgctttaaaagatttttttttaaataagctttaatatagaaaattaaacttagcaataatgctaaaaggatcaatgtttcaatcataattaaacagtaactagttttttaccctgatcagcaacagcatcgatcttctcttttaatagcgtttcatcacctaaatagtaatgttttattactttaaattcatcatcaaattcatatactaaaggaattccagttggaatattaatattcatgattgcttcgttacttaacttatcaaagtatttaaccaacgctcttaatgaattaccatgtgcaacaattaaggctcgtttaccagcctgcatatctttttttactgtttcattaaaataaggaataacccgctcaattgttgtttttaagctctcacctgctggtaaaagagcagagtcaatatttcgatacattgcctgcttttgcgcgctgcgtttatcatttatatttaaagctggtggcagtacatcaaatgaacgacgccaaatttttacctgttcttcaccgtatttttctgcagtttccgctttatttaatccttgtaaagcaccataatgacgttcgtttagtttccagcttttattgacaggcagccagcagagatccatttcatctaatatatgatttaatgtgtgaatggctcttttcagataagaagtgtagcacacatcaaattcataaccttcattttttaaaatcgtgcctgcttgtattgcttctcgatggccagtttggcttaaatctacatctgtccatcctgtaaaaagatttaatttattccagtcactttctccatgacgtactaatactagtttcataatatctctccttttagttagcttaagctaactatatttgtataatattccaatgaacaaaatttgtcaactaagatgataataaaagcaagctgttacaatatttttcacaaaagaattaatctgattttactgactgaaaagattaagatttcatttgaaatgatttttagttataataattttataggcttgagaagttagagagtgagggaatggttatagtaacagcaagcactgatgtggctttttgattatcaatgaaaatatatataaaaatatgataatattttagtaacattggaaataaaaatgccggtatcgattaatattgatgaaagcgacttttcaacttttgaaaatgctggatttaatattaaaaataatgatatattagaaataatgaaagcgatttaatgaggtaggaaaatgagtagagtaaaaagtttaaatatcaagtatgtagccagtcaagtattttattttgcaacctttgccgcaatgatgggatatgcctcagtatacctattgcacaaaggttttagtaattcaacaattggtataattttgtccctatgcaatattttagcggtgttcatgcaaccggcattagcaacttttgctgataagaatcaaaagattgaaattcgtaaaattattacaactatcgttgcaatagcaattgctttatctgcaattttattagtagttccaagtaatcaggcaattatttttattttgattgtatcaatcttttcattaatgacaacgataatgccgctaatgaatactttggcatttgtttttgaaaagtatggaattcaagtgaattatggcttggctcgagggctggggtctgttgcttacgctgttgcatcaatggtattaggacatgcagttgatgcttttagtccggatttattaccagtatgttatgttgtctttaatgcactattatttattgttgttcatggctatgtattgccaaaaagtgaacaaatcgaagttgcagttgagacaaatgacgaggatgaagttgcagtaaataatgaaggtttgctaagatttgctggtaaatataaaaaatttattgtatttttattagggtttgtttttgtttattttgcccatacaattattaataatttctttatccaaataattactaatgtaggcggtaatagtagtgatatgggaaatgctgtatttttagcagcgatgttagaattaccgacaatggcatattttacgaagcttagtaaaaaagttaattgtggaacgttaattaaaatttctattattctattcttagtaaaacatgtgattacttattttgcagatggaatgacaatgatctatatagctcaagctttccaaatgggggcttatgctttatttattccggcatctgtttattatgtgaattgtaaaattgccccacaagatatggttaaaggtcaatcatttgtgactacttcaatgacagtagcaggggtttttggtaacttgattggtgggatgttactagattcagttggtgttagtcaagtactgttaattagtgctgttctatcattaataggtgcggtaattgtagtaatgtctgttgaaaaagtataattttatagaattaatgaaagtgttggtttagttatttaaaatggtgctttaaaataatatagggtactaaacaaaaagctttaacaaaaagtagggttagaagatgtataatcttcaataattatcctactttttatgtctagatatagtattatttcattttttatttgtttttgtttttcttgatttgttttttattaatagaaattgtatacgtatctaaaagattctgagaatacataattctatttctagctctgtcaaaattggtcattccattttcattagatagaatcttttttacataattattttttccttcaatacatccgttagatattcttcttcattatattcattttctttaacatcattaaatacacgataatcttcttttaaatttaagccatttttaattccttgtttatagaaagaacacattctaatactccagcttcactagttgtataacctaatgtacgatcaaaaaagtacttttcatcatttattttatcgccactctttaaaagcagttcgtatctatattttaataatttgtattcttgactatctttgtaacgtcttaatatccttttcctaactgaatttagacagactgtaatcttctttaaaacacggaaactgtcaatacatattatagttttaggaaaatatagtctcattaaagtgcggtaatgattatacatatccatagaaatgtattttactttatcacgttcactcttaggaatggagaagaaataatcattaagtttctcttcacatctagattcaacgatatctaggataagttagtttttgaatcccataatcataaatgcatatttatatttagaacgtctgtcgaaatagaaatcatctatacatatgatttcttgtaagtggtgtctttttaattgaacatgattatcaaatattcttactactgttgaagggctaacgttatagcatttggcaatagatgagtaagtagctgtataatgtttaagatcatttaatatagaaattaatgtaacatttgtaatagaactataactcttatcaaaagaatttggttcattaaatgttttccttcagtaaggacatatcattcttcttaattcgtaattaatatatgtatcagtagcatttatgatttgataaacatattttctttttttatattcttttactttagaagttagtttaagacattgaggacatctgcaaggttatccattaagatgtacatataacaatatttgtggttgagtttcttactgtctcaatgttctctacatcttcttgttttaaatctaataaattaatgataaaatttttgataagggcttctctgtttatacttatatctagacaaaataattataacaaggaacccttttaatgttgaaaaaacctacttatgttaaagcaagaaaatgaaaaaccctacaaaattttgttatacctttaaaatgctagatcaacactgtttatatagaaaaataaattttattttaataatataaaataaaatctaattaatacttaagttactttgatatttatgttagaatcttaatattgcgaataggaggaaatatatgagtaaagtaattaagttaggcaattataaaggaatcgaggcagaagtaacaaaacaacctgttgctgatacagaggtagataatgagattcaacgtttagttgctcaaagtacaagtctaatcgaaaaagatggtgatgttactaatggcgatgtaacaactattgattttgaaggttttaaagatgaagttgcttttgatggtggaaaagctgaaggttttcaactagaaatcgggtctggtcaatttattcctggatttgaagaacaaatgattgggatgaaaaaaggtgaaacaagagaattaaatttaacttttccagaaaattatggagctgcagatcttgctggagcagatgttgtttttaaggtaactgttcataaaattgaagagaaaaaagaagctgagttaaatgatgcgtttgtagcatcactaaatgcacctggaatcgaaacgattgatcaattacgcgataatataaaagcatctttagaagcccaacatgaacaggcatttatggctgctaaagaaaatgcagcattaggaaaattaattgatgactgtgaagtagaagtagaggaaagtgatattgaaaaagcgctgcaacaacaacttcaacatatcagtatggaacttgctagtcaaggaatgcaattagaacaatatttacaaatgatgggaatgaatcaagagacattattacaacaattagcaccttcagctaaacaacaagcaacttttgaagccattattgatgaaattgtggcgattgaaaatttagagactagtgatgaagaagcaaatcaacaagtagaagcaattgccgcacataatcaagtgtctaaagaagatgttttaaatcaaattgatattgaaagtttgaaacgtgatttaaatagaattaaagcaagtcgattaattatggataacactgtttttattgaagtataatagaaagaattattgatatctttattaagatatcataattctttttttataataagtatgaagattgtacagttacttaatccaagatgaaaaataattgttataattagaaaaagttgataatttaaatcgagggttatatgaaaaaaattttaattagtattattttatgtggatgtaaaacagctgtgagtcgagaaattaaaacagaaacacgatataatcaaattgaaatcaatgcagctatggatgaaattgaaatggaatttgcaaattgcaccttattggaattatcttttgatgaaacaaatgagcaaaattaaaattttgatggtgggaaaattattgtttatggtaaaatcaaggttgacgagacaattggtatcgaaaatttagagattaacagtatttgtgataaatttttttaattttggaagttaacatgcatggtgagtggaaaatagcaagctatggatgttgaattctaggaactagaagtatttaggaaagtaaaaacgataataaaggaggaattgatgatgcaacgtggtattttaattacgggtggcgctcatgggattggaaaacaaatttgtttggattttttaaggcaaggggataaagtatgtttcatagatattaatgaagaggcatcaaaacgctttgaaagtgaatatcatgatttatactattattacggtgatgtagcaaatccagatacattgaaaaattatgttgattttgctaaaaaaaggttaggacgaattgatgtattagttaataatgcctgtaaagggatgaggggaatattatcggatattgattataatacttttgattatgtactttcaataggtttaaaagccccttatgaattaagtcgattgtgtaaagaagaattaattaaaaataaaggaaagattattaatattgcttcttcacgagcgtttcagtcagagcccgatagtgaggcatatgccagtgcaaaaggtggaatcgtagctttaacacatgcattagcgatatcactgggtcctgacgtattagttaattgtattgctcccggatggatcaatgttgatgaaatagaaaattttggtgaacttgataaggcttctctaccggctgggaaagtaggaacaccaaaggatatttctaaaatggttttatttttatgtgggcaagattttattaccggagaaacgattacgattgatggcggaatgaacaaacggatgatttatcatggtgactggaattggcaatatcatgaagaataaaaaatagtaatatactaatttttgttattttaattttaaagctaaatataaaatattagcatcacgaaattttcgtggattataaccacataatttatggatacgatctaatttatactgtaatgtatttttatggataaaaagacgattagcagtatttaataaggacatatcctcttcaaaatatatgtgtaataaatttaaatcttctaatgataacattgcaattgttttatttagatagtcttttttgtcataaatggatattgattgaagaataatttcaagtgttaacacatcatagttaatatattgatggtcttgaatatttcttagagcaattaaggcagaatgataagattcactaagttttattaaaggaatttgtttaccaacagctattgaaacctgattaccggcaagttttttgagcttatattcacatctattaaagtaatcagcatctattattgctagaaaacgattggggtactgatagtgatataccggaatggctaagctatgaagttcttggataatagactgctcatttacgagccgttttgctaaaataatcaaaagacgataattgttttttaaatctaactgaaaatattttaacatatctgaaaaatattgggagtcaaggttttcttggtccagtaatgattgtaacagataatgcattttttcagcctggctacgattaaattcattcagctctttttctcgaattaatagatttgtgattttttgtgctaaataggcatatttttttactttatcaggtttaccactgattccaataacagcaataatttgatcgtggtaatagactggtaaattaactccctgaagactaccattaaaactagtatcatcatacacttcgataattcttttctccttgatggctaaaagaccagcttcatggaaggaaccaattctttttatatctgtactggcatagataattccttgacaatcaataaagttaatatcgtggtcacaaatatctttaactgtttcaacgatttgagtagctaattggttattaatatacatataatcctcctttggtataagtactaaataaatatgcattttatttaaataacatgttaattataacatattatttataaaaataatttgttatattataactaagaaaaacaagggggataaaataatgaaaatagttattgcaatcgattcgttaaaaggaagtttatcttcaattgaagctggagaagcaatcaaagcaggaatagagcatgtatatgatgatgcaaaagtaatagtaagcccactagctgatggtggagaaggaacggttgaggcattaaccgagggtatggatggaaatatgcgttctcttgaagttacggggccattaggcactagagtagtttgtcaatatggaattattacagaaacgaagacggcagttattgaaatggcgagtgctgcaggaattactttggtagctccagatcagagaaatcccttactgacaacaacttacggtgttggtgaaattattgctgatgcaattacaatgggatgtcggcattttattatagggattggcggtagtgccacaaatgatggaggaataggaatgttacaggcactaggttaccgttttttagataaatatggaaatcaagtaacatatggagcacaaggactggaacaattagttgaaatcgatgacagtggggttgtttcttcgttgaacgagtgtacttttaaaattgcttgtgatgttaataatccgctatgtggtaaactagggagtagtgctgtttatggaccgcaaaaaggggcgactgctgaaatgataaaaaaaatggataaggggcttaatgattatgctaaattagcgaaattaaaatatcctaacgctgatccggaactacccggtactggagctgccggtggtctaggctttgcatttttgacatttttaaatgcacaattagaatctggtattaaaattgttttagaagaaacacgattagaagaatatataaaggatactgatattgttattactggtgaagggcgtcttgattttcaaacagctatgggtaaagctccaataggggttgctaaattagcgaagaagtatcataagccagtaattgcttttgctggaagtgtgacagcggatgctaatgaatgtaatcaccaaggtatcgatgcttattttccgattgttcgtggtgttacaactttagaggaagcaatggagagcagtaatgctaaaaataatttaatagctactgttgaacaggtgtttcgtttgtggaagataaaataagatgatatgataaatgtatataaaatttgttcaaaaaggagcgatgggaatggggatctggattaaacagtagcatgcagggctttactgtttatagccttgctcgataaaaaattcaggaggcagaatatgatatattttaaatacaagaaaaaaatgtttattgtcagatgttaggggaagagtaaccgctattgtttttgcatggaaatacagcatcagctggagtgtttgaataaattttatcactatatcaagatgagtataaacttattttaattgattttttaggacatggtaaattacagtgaatagcgaggtttcctactgacttatggtgacaagaagctgatcaggtaatcgctttattagaatccttaaatattaaagatgttactttaatcgaaacaagtggaggtgtttggggtgcagttaatgctgcattaagacgctcagatttaatcacttgtgtagtggcagatagttttgatgggcgaactcttcgtcggggatttgccaaagcattaatcgaggagtgagtcatggcaataaacaatcttgcagcaagacaattttatcaatggtgtcaaagtgataattgggagactttggtgaatcaagatactgaggcactgttaagacgaattgatttgggtttaccgtagaagtacctttaaatactttaaaggtactattgttgttaattactagtgggaaggatgcgatgttacacagtgatatcatagaagaatatgaaaaaattatatacgagcatccacctgttaaaatgattatctttccaacgggtaagcatccttcgttattatcaaatgccgtggcagcatccactgctataaaagaatttttgagcagtagtaaacaaaggagttaactcctttgttttagacttcagttaataaaaatagtatttatattataattacaaatgatatactcatattaattagtaaaaggagaaacagaaatgataaaagcgatattttttgatattgatggaacactagtgagttttaaaaatcatcaaatacctgcctcaactatcgagtcgttaaagaagctaaaagaaaaggggatcaaaatttttgttgctacaggacggggaaaggatggtttagatattttagatgagattgagtttgatggctatataaccttaaatggtcagtattgttatgttgataatcaaataatatatgaaaatacaattaaacgagatgatttacagaaacttttgaattatttagaagaccatccttttccatgtgggttcacggaagaacataataaatattttaatcttcgtgatgctcgagttgatgaaattcatcgcattactttgaatgatgatcatccagctggtgattgtagtgatgtagttaataaaaaaatttatcaatgtatgtgctttattgatgagcaggaagaacaaaaattaatgcagattatgcctaattgtatttctgcgcgatggcatccacttttttgtgatgtttctcccaaaggaggaacaaaacaaaatggaattgataagtttttagatttttaccatattgatcgtaatgaaacaatggcttttggtgatggtgggaatgacattgagatgttacaacatgtggcattatcagtggcaatggaaaatggtaatgataaagttaaagaaattgctgattatgtgactgctgatgtagacgaagatggaattttaaaagcactgcagtatttcagtattctttaaaataagatgatgacttatcattaatgatgaaagtgatatttcaagggagtataatattgtttgtaagaggtgattaaaatggatgaaattaaagtgccttcaactagatatcataaaatagtaaatcttctttgtataataatgttgacaggaacactagtctttttggtaactaattggacgatgatcccggatcaaattccaggacattatgatagtgctggagtaatcaatcgatggacaagtaagtcagggctatggatagtttattttgttggaatcataatgtttgcgggattatcagtaatagaacattttcctaaaacgtggaatactggtgtagctattactaaggaaaatcaaaaacatgtttatcaattaataaaaggaatgatagtaaccctgaaattatgtatcaccacaatatttatgtttttaacactgtatacgactttgatgattaatttgccaaaatggtttacaccgctttttctaattattacatttggttcaatgatagtttatggtataatgatttacagagctcgatgaaattacctaataattaagggtgtattaatctcttattaaaaatacgaaaatgataagtcatgaataaacattcatgactttttctatatgtaaatgatatttgtttttaataataaattgaactatcgcttttaatagtgttcttctgtaaaaaattatttccgtgtctaatacatttttttcgtacaaaaataatatattgatagcattcctttatattttatgtcttttctgtagacgatagtttacagaaatatatccttttatcataaataatggttgacctaaagttcactttaggtagtacaatgtattttgaggtggtaaaagtgaaatatcgggaattaggaagaacaggtttaaaagttagtgaaataggtttaggctgtgaaggatttatgaaaatggatactgatcaagttaagaaatttgttgctcaggcttcaaaaatgggaataaattttatagattttttttcatcaaacccacatgggcggagtgcttttggtaaagcgatagctggtaaccgtgaaaagtggattattgaagggcatatatgtactttttggaaaaatgaacagtatttgagaactcgtaaaatggatgaagtaaaagctgggtttgaagatttgctagcaagactgcagactgactatattgatattggaatgatccattacattgatgctaaaaaagatttcgaagaagtttttaatggtgaagtaattgagtatgtaaaggatttaaaaaaacgtggaattattaaacatattggaattagttctcataatccacttattgcaattgaagctgttaagacaggattagttgatgtaatactgttttcaattaatccttgttatgatatgttgcctccatctgaaaatgttgatgatttgtgggatgatgaaaggtatgcggaaccgctttttaatattgatccagtccgtcaagaattgtatgaattgtgccaaactaaaggagttgcattaactgtgatgaaagcatttggagggggagatttattagatgaaaagttatcgccgtttaaggttaaaatgacaccgttacagtgtattcattattgtttaacgcgaccgggagtagcttcgatcatggcaggaagtcatagtattaaagagatgatggaggcattagcttatgaagatgcaagtatggtagaaaaagattttgctaatgttttagctaatataccaaaacattcatttgaaggaaattgtgtatattgcggacattgtgctccatgtgtcaaaggcattaatatagctgatgtaaataaatttgcagatttatgtgttgctcaaggggaagtaccagaaacagttagagaacattatgaagttttagctcatcatgcaagtgaatgtattgaatgtggggtatgtataaaaaattgcccattcaatgttaagattattgaaaaaatgaaagcagcagtagcaatttttggttattaaagctattgcgtgaggaaacattatggttgaaaagtttgatatagtaatcacaccacttggattagagcgaacaatccatgtatatttaccagaagattattatgatagtgatgaacaatatccagtgatgtatatgtttgatggacataatttattttatgaccatgatgctacttatggaaaatcgtggggactaaaggaatttcttgatacctatgataaaaagttgattattgtaggaattgaatgtaatcatgaaggacaaaaacgcttaagtgaatattgtccctatcaaatagaaagtaaatattttggtcatctcaatggacaaggaaagatattgatggattgggttgttaacgaattaaagattctcgtcgatcaaaagtatcgcacttatccgtttcgtgaatgcacaggcattgctggaagttcaatggggggattaatggcgttttatactgttatttattacaataagtatttttcaaaagcagcttgtatatcgccatcgatttcaatgtgtatggaagaattgaaaaatgaatatactcaagctaaaatcatggaagatacgcgggtatactttagttttggaactgatgaggtcaaagggaaaaatgggattcaatggatgttgaataatatcttatattttaatgatagactgattgaaagtaatgcatctagttatataaatgttgtggaaaaaggtcagcataatgaagcatcctggcagttagaaaatcaaatatatctagattatttatggaaataaaatatttttttagtgattgcgattgcagataaaatatattaaattaaggttatagctaagcatggttgaaaccatgcttttatttttgattttacctaatatggcttgtgtgatacaattattaaagatactaacaaaccaaacagaaataatcatttatagggataaaaaaatgaaacgaaaaaagagaaaatttgcgataaatgtaatgtcgttagctgtaataccgatactgattttaggaatgtttgtaatctttataacctcaagtttaatttatactgccttaaagggcgaagttgctaataatcttgaagatttggctagagtatcatatcaagactttgacatgcaatatccaggtgattattacttaaataataaccatttatataagggaacagaagatattcaaaatgattttaatttggtggatttaattaaaaataataccggggtcgatgcaactttgttttatcaagataaacgcatactaacaacaattcgtcaagaagatggcaaaagagttgttgatacgattgcaccagatgaagttatcgaaacagttttaaataatgataaagaatttttttcagattctgttgtaattaatgatagtagttattttggtttttacatgcccgtaaaaaatactgatcagcacgtcgttggaatgctttttatggggcgtccacgtgctgatgttatgaatcatattatgcataatatttatcttgtttctctttcaatcgttacaattatgataattgcaattattgtatcttattattatagtaaaaaaacgatttttgctttaaatacaacaaaacattttttaggagcagtagcaaatggagatttgacgactgaaatagatccatatgtattacagcgtcatgatgaaattggtgatatggggcgttttgcggttatgatgaaagagtctcttagtgatttagttggaaaagatccgttaacgggattacataatcgccatagttgtgatgtggttttagcgagtttaattcagcgtgtaaaacaaaagaacacttcttttgcagtggcaatgggagatgttgatttttttaaatatgttaatgatacatatggtcatcaagcaggtgatgaaactttacgtcaacttgctaaagttatttcgatccatatggaacacctgggatttgtatttagatggggtggtgaagaatttgtcttgatctatgaagatatggatcggtatcaggcttttaagcatttagaaatcttacaagaacagattgatcaagagagtatttattggaaagatgacaaagttaagattacaatgacatttggcttagcggattctaatgaatacaatgatcttgatgaattgatcaatttaattgatgataatctttatcgagggaaaaaagaaggtcgtaaccgaattgtttttaatactttaaaatagaaattaaaacatgaccgttaagataattttaacggttttttagataaagatttctaattgagaaaatatctttaatgtttcaaaagattagatacaatagaactataaactttattaaaggtatgaggtatgaaaaatgataaaattaattgtatcagatatggatggaacactattggcgcatgattcatcaatttcaaagggaaatattgaagcaattaggtatgctcaaagtaaaggagtgcaatttgcaattgctaccgggcgtgattattcaagccttaaggggatattagaggcacatgatttaaaatgttttagcattttaggaaatggagcacaattttgtaatgaaaatggagaaattttatcaagtgcatattttcctaaaaaatgttttaaacaagttttacaaatatttgatgaactaaagattcattatatgatttttactgcgaatggtttttattcaacagctgagccaaatgttgttcgtgatgcttttattgatcgctgtgttgttcagttcaagcgcaaacgagaggactacttagatgatggctgtaatcaagatatggcgtgtatgaagttaaaaaaaataggtgacttagatgattttattaattcttcaattgatattattaaggttgaagcatttaataatgatgtatcattaattgaaaaagctaaagaaaaacttcaggaaattgatgggatagcttatttatcatcatttgatgataatattgaagttaccgataaggcagctcaaaaaggattgattttggaaaatgttattgaagaattaggttattcaaaagatgaagtaatggttttaggtgacggtctcaatgatattacattatttgagcggtttaagtattcttttgcgccaggtaatgctaatgagacaattaaagcaatggcttatcaggtagttggagcatgtgaagaagacggtgtttcccaagcaatctatatgatgttataataaagaggattgataagatcttctttttttgatgggaggaatttaatgatagaaattaaatttttaaaaagtacggatgaatattgggatacaatgattgactatgttcaaaattgttcttggcgtgctggtaaatctttggctaataaaatgaagacagggtattttactaaatggcagtgtgtagttggggtttggtatgataataaaattgttggtttttcgacttttgttgaaagtgatagtatagataatagtggctatcagccttttattggctatatctatgtgaatccgaattaccgtggtcaacgtttaagtgaagtgatgattaaagaaattattgtatgtgcaagaaaaatgggttttaaaaaaatatatatacatagtagtgaatttggtttatatgaaaaatttggatttaaaataattgattgtggaaaaacgtgttcgggaagatatgaaaatatttatgaaaggaagattgcttaatgattttgtattttagcgggactggaaatagccgatatattgcagaggtaattaattcagtgattgaagataaattagtttctatcaatgaatgtttaaaaaataatttaattgtttcattagagcagcagtatattattgtttgccctacatatgcgtggcgtattcctcgggtagtggagcaatttattcggactaatcattttgtttcgggaactaaaatttattttataatgacatgtggtggagatattggaaatgctgctaaatatattaaccgtttatgtaatgaaaaaaatatgattttaatgggagtcggagagattgttatgccagaaaattttattactatgtttaaggcaccagaaaatccagaagtgattatttcacatggtgtagaaactgcacttttactagcagctgaaatcaaagcaggaaaatattttttagaaactaaacctacgtttataggacgatttaatagtggcatagtcaataggcttttttatccaatgtttgttagggctaaaggatttcatgttgaagatacttgtattggttgtggtcaatgtatccatgcttgtccattaaagaacattagtctagttgattctagacctatttgggataaacattgtacacagtgtatggcatgtatcagtatttgtccaaaagctgcaattgagtataaaaataagacaaagggaaaaagacgctactatcttaaagatagttataataaggaaattaaatgaaaattgtaattactccagctaaacggatgaacgataatattgattatatagacgtagaaagtttacctgtttttttgccacaaacggaggaactgctaggaattcttaagacactaaaagtcgatgaagtaaaaaagatgttaggttgcaatgatcaaattgctcaaattgcatacttgaattatcagatgatggatctaaaaaaggacacagttccagcactgctagcttatgaaggaattcaatatactaatacggcagctcatgttttaactgatgatgattatgaatatacaaaacaacatttacgcatcttatctggattttatggtattttaagaccgttcgatggtgttgtgccatatcgtttagaattaaataataaagtaaagacagaaaaatttaaaagtttatatgagttttggaacagtcgaatttatgatgaattgacaaaagatgataatcaaatactagatcttggggcaaaacaatatactaaaatcataaaaaaatatttaacatctagcataaaatatgttaaatgccactttaaagaggagagtgatgaagggtatagggaaataggtgtttatgtaaagatggcaagaggacaaatggttcgttatttaattgaaaatcgaattgattcatttgaggcagtaaaacaatttaattatttaggttatcaatattgtgaagcattatcagatgtggaaacatatgtatttatacggaaaaaggggacatgatatgaaaacattaattaaaaatggaattgtgattcttgatggaattaaacggcttaataacggtgcggtgatgattgaaggtggaaagattacaggtatttataaagattatgaaggattagaagctgatagtgttattgatgttcaaaataattatattattcctggtcttttggatacccatacacatggggcgatgggatatgattttaataagtgttcatcaaagcaggagttagaaataatcagtgatagcttattagatgagggagttactggttttaacgctagtattgtttgtgaaagccatcacgacacattgaatcttttacaaatgtatgaaggaaataccccagataatttaattggtgttcatcttgaaggaccgtatttaaatattaagaacaaaggtgtaatgaaagaagaacatttacgtttagtaaattttgatgaatttaatcagtatatttcaacttgcagaaaagtgaatgcaatgacaattgcccccgagctgcctaatgctttagaattaatcaattatgcaagtaaccatggctatgtgatgaatgtggggcattcaagtgcaagtgctaaagaggtaaaaaaggcacaagcatacggtgcaaaaggaattactcatctttataacgcaatgtcacagcatttgcaccgtgatcctggagttgtaactggtgcaattttatcagatttaatgtgtgagcttatcgtggatggctttcatattgatgaagatgttattcgtgcgacatacaaagcaattggaaaagagcgaattattttgattactgatgctaatccctgtaagggattgccagatgggcaatatcatttttctggtaaagatattgtaattgtcgggggacatgctacagtcaaagaaactggtagaattgcaggaagcacattagggttaaatgaagcttgtgctaatatgatgcgttattgtgactgttcaatcgatgatgccgtactaatggcggcagttaatccagctaaattatatggattaaagcaggggaagatagaaattggttatcagggtgatattgttgtcatagataaagagtttacaatcttagcagttatcaatcggggaattataaaaagaaataagtttatttaaatatttagtgatttaacttgactttaagaagatatttgatagaatattattcgcggcaacgtctaggatatacgagtactcgacgtatagcttggagttagctaagttaaacaacaggaggataattagaatgttaactaaagcagaaaaaacagctattatgcaaaaatatgctactaaagaaggagatacaggatctccagaagtacaaatcgcagtattaacagcagatatcaacaaattaaatggacatttcaaacaacatccaaaagataatcattcaaatagaggattattaaaaaaagttggtagaagaagagatttattaaaatatttaaaaaataaagatattgaaagatattcttctttatgtgaaagtttaggtttaagaaaataattggacgctttggcgtcttttttctttacaaaaaagctgaattgaattcaactcagcttctaagagagggttcacccttattttgaataaacttttttaatgataatcatgtagataaccaagaaataaccaacaaagagttgctgataaagaataaacataaaaaacgccatagtcaaacattccgccaataaattcactaacaacaattaatgtaaaaatcattatctttaaataattggaactttgctgttttactttaaataattttagaatagatttaaatgaagcaataaaaaatattataaatagactcgctccagcgattccagttgttacaagagtttccaaaaagacattatgactatgaacaacctggatttgtttgacaacattactgttggtcaggtgcctaccaatagtttgaaaattaccggcaccaattcctaaaatagggttggtttgccaaatttcaattgaagtattaaataattcaatacgtccactgctgatctgattaatttgatctaaacttggctgaaaatctccttgaaaaaacaattcaattgattcaattactttattaatttgaaaacggctgcttgtttcgtgatgattaccacttaaatatgataggccgttagcggtgatgatactagtaatgaaaataatgatagaaagacctaaagaaaatagatatttctttaactttgaataataacaatctttaaaaaaataagtatatattaaaccagtcaaaatgacagccaaaataactagagctgctcggcattgagtcaaaataatatataatagttggacaatgatatttagtttatataatcgtggatgtgtatattcgttttttaatgcataaagtgctaataaaatagtaattgcactcaaaaaggctgcaggattacaattaaaatatacaccaaatagtcgatttcctactaatccgattggccatccattttgaattttcgagaatttaaataaatacattattaaagaacagattccagctagaccggttaataggttggtcagaggaataatactttttaattcatcgtagatattgtttgatgaaaaacttttttgattcccgtagatcaaaaaaaagatcattagctgtaaaagtgcaattaaatatgattttaaattactatatggattgatcgctgttgcaaggaacaaaatcaggccgtaggtaataattaaaataaatttaatatcatggtaattaatttgtttttgataaaagtcccatccaatgataagtcctccccatccaatcatgataaataacaaaatattaagattgaaacctaggtaacctagggcaagtgtattgataaaagcataaataataaatgctaatttaaaatattttcttgataatagataagtctgcataatccccctccatgatattcattctaacaaaatattgatattaatactactttaatttgtttgctgcgatttgcttattacaataactattaaaatagttaaagatagtgtataattaatgaagaatatttagaaatgagggactttatgaagaatattacattggttattatggcggccggaattggtagtcgttttggaggtggcattaaacaattggcaccagtaggaccaaatggtgaaataatcatggattattccatttatgatgctaaaaaggcaggttttaataaagtagttttcgttattcgtaaggatttagaagcagaatttgatgctgtgattggatcacgaatcaaacaaattattgatgttgaatatgtttttcaagaactagataatattcctgacgaataccaagaaacatttaaacaaagaacaaaaccatggggaacagggcaggcaattttatgttgcaaggatgtaattaatgaaccatttttagttattaatgctgatgactattatggtaaacaggcatacgaagaagcttataaatacttaaatgaaaatcatgataatacggctaaacaacagattgcgatggttagttttgtacttaaaaatactttgagtgataatggtggtgtaacacgtggggtgtgcacggttgatcaaaacaatcatctttgtgatattgttgagacacataatattgaaaaaggtgataattgtgcatttgttaaaaaagaaaatcaaattattgaacttgatctcgaggtaccggtatcaatgaatatgtgggctctacaaccagaaatatttgatattttagattctaagttcaaattgtttttatctcaattagagaatgataattttaaagatgagtatctattaccaactattataggttcactattaaaagaaaatcaggttgaagtgactgtgttaaaatcgttagataattggtttggagttacatataaagaagataaacaaacagttattgaaagtattcaaaaattaacagctgtcggtgtttatccacaaaaattattttaatagaaaccgaaggaagatgtgggtatcttccttttgtctttcatcagcatatactctttggtataattaataatgatatgaaaaacggggaaagtcgaatggaacaaattaaattaattgaaaaattattagaaataaggaaatataaggaaattaaagaaatcttaaaagaaatgaacgatgtggatgttgccgaaatgctcgaaggtttttctgatgaaaatatgatacgtatatttagattattgccaaaagatgatgctgcagatatttttgcatatatgtcaagcgacagagaacatgcgttaatagattcgttaaccaataaagagttagagaatattattaatgatctttattcagatgacgtaatggaacttcttgaagagttacccgctaatgttgtgaagcgaattattgctgcttccaatcctgagactcgtcgtgatataaatcatttattacgctatcctgaagattctgcaggtagtaatatgaatatcgattttgttgatttacgtgcagatatgacagttaaggaagcgattgcacgaattagacgtattggagtagataaagaaacaatcaatacttgttatgtaatcgataattttcgtcatcttttgggaattgttactttgagaaagttagttttatcatcacaaagtgctttgattgaggagattatgaacgataatcttattacagttcatacgatggaggatcaagaggatgtagcacatgattttcaaaaatatgacttaacttcaatgcctgtggttgataatgaaaatcgtttagttggaatcattacagttgatgatattgttgatatcatgcaggaagaaacaactgaagatatcgaaaaaatggccgcaatggtaccgtcagacaagccttatattaaaaatggcccgtttgaaacatttaaaaaaagaataccgtggcttttgttattaatgatttcagcttctattactggaaaaatcattcaaggatttgagcatgctttagcgggctctgtgattttaacggcttttattccaatgttaatggatactggtggtaattcaggttcgcaagcttctgtctcaattattcgggctttgtcactagatgaaatcaaacatagtgatatcgtcaaaattgtttttaaagaatttagagttgcaattttagttggggttactttagcagcatgtaattttattaaaatgatgattattgatcatgtttcaatcatgatagctgctgtagtttgtctaactttgatagttactgtaatcattgctaaaatcgttggctgcactttaccaattttagctgataaattaggctttgatcccgctgtgatggctagcccgtttatcactacgatcgttgatgctttgtcattgttgatctattttacgattgctactaatttattaaatttataaagtctctggaagattccagagactagtttttatttacaagaatcattattgcgtaggtcttgtaatgcttcaatagcacaacaggctttttcttttaatgcgttttctagttcctttacagtaccaattgtctgtgctgctgattcattgattgcaattaattcatcgatacatttagctaaacatactgcttttttaattttttcactttcagcacataaaattgcagctaaggcaccttcttgcattgcaactgattgtaaaacagccgctaaggcacaacgttcatcaacgcaacaaccttcaatacagcaattgtccatgcagcagtcatcgatacaaaaatctcgattacatgaattcatgggtttcatctccttccatactataagatatgcaaggggaatagattgttagtggcttatgtcttgaaaaacaaaaagagcgtgataacaacgctcttatatatttattcaactgttactgatttagctaaattacgaggtttatcaacatcgcaacctttaagtttagcggcataataactgattaactgcagtgggattgcaactaatactgcttgtaaaattggatttacatcgggcatgtaataagtttcatcaacatttccaacctcttcaccggttaatgtaaataaaatgacttttgctcctcgagcaattgtttcttgaatattgctaattgtttttgaagctatatgtggttgtgtagcaactgcaattactacactgccttcttcaatcaaagcaattggaccatgctttaattcaccagcaatataagcatcagcatggatatatgatacttcttttagttttaaagcaccctctaggacggaagcataatctaaacttcgcccaatatagtaggcatctttttgattttttaaatagttcgcatatttttcaaatagtggttcatcttttaaaatattttcgatttgtttaggcaatttagcaattccgttaataatgtctttatagatatcattttcttttcctagggtctgtgcaacatacattgctaataataataagacaataacttgcgtagtataggctttagtacttgctacagcaatttctggtcctgcacaagtataaattgttgcttcagcttcacgcgagatagttgaaccaagaacattagctacggcaatcgtagtacaacctttattttttgctaaacgtaaagcagccatggtatctgcagtttcacccgattgtgagacaaaaatacacagagtttttttatcaatgatagggtcaccatatctaaattctgaagcggcttgggtaaaagtaggaataccagttaagcgttccataatattggctcctgaaaggcaagcatgatatgcagttccgcaagcgacaaaatatactttattaaaagttgtaaaacgttctttcaatatttctagttcaggcaaaataattcgatcattaccttcaactcggcctcttaaagtttcactaatagcatatggctgttcgtgaatttcttttaacatgaaagtatcgtaaccgcctttttgagctgcttcattatcataagggatatgtgtaatttctttttgaatttcgttgccttcagcgtcatagaaagttattttatttttacataatttagcaatttcaaaatcatcaataaaatagacatctttggtgtagtctaataaagcaggaatatcacttgccccaaaacttgcacagtcacttgtccctaatactaatggactgtcttttttagttacataaactacatccggctctaaagtagaaacaatgcataaagcgtaacttccatcaatgtgagtaatgaccttttttaatgctttcagcatatcaccatcatagtaagaatctagtagatggacgacaacttcactatctgtttcgctatggaatttataccccttagctactagttgttcctttaattctcgataattttcaatgattccattatgcactagtgaaatagtgtttttattattggtatggggatgagaattaaggttagatgggactccatgagttgcccagcgagtgtgaccaattccgacacagccaattggagtatcttgatctagtcgatctatgagattttgcaatcttcctttcgttttaatcgtgaaaagtttatctttatctacaagggttacaccagctgaatcatagccacgatactctaatttagaaagtccttgaagtaagaatggtaaagcttcttctttaccggaaaacgcagtaattccacacataaaaattcctccatagttttgattattcaattgttattatgttatcaatggaggataccgaatgaatttgtttaatgattactcattatttttgttcattgtttaggtagtatcatacctctagaccatccgccgaatatttcgataagtctagccctcgtcaactaattacttagtcctggcgctattttgtatttctgtctccttaataacagttgctattatatacaaataaaattaaaaaagcaacccatattataatatgaagtatttgataatagatgcaaagaaataaagcataaataattagttttattatttacattgactcatttcctgataatttttaattattttatgaataaattaaaaaaaattgtaaaaaataaaagtgattttccaagtttaggagtaaatgataataggagggataaattatgagtgtacatgaaaatttaattgaaataagtaaatcattagagaatttagaagaaacaggtatttatgacgttgaaaaatacagctgttcattgaaacatttgacaaatcaactagaatatttttattgtcatctagttaaagaaaatggacgtgatattgacagtacatattatcatctttctaatcgaccacaagttcatcaattagcatatttcaatatcggacgtggtttccctaaagaattaatggatgggcactggtgttatattttaaaggatcttggctataaaatgctgattattccatgtacttctataaaaggaacaagtgctaatccagaatttgaaatggatattgaagtgatgatgtcgggcgtaaagactaaaagtcgtttacagttgagtgagatacgttgcgttgatatgcagcggcttgatttaagaaagacattttgtgatgttttgagcagtcatgatgatattataaagtatgtaaaagagcatttgttaaaataaaaatagcctaacaagtaggctaataaactaaaatgagtagagttatcaaaagtaatatacaacaaaataacagcgcacattgtccaaaaatattaattaaacctgtagcaataatggctccaatgataaaaaagaagataatgatcaaatagcgaaaacaatgatgtaacgcatctttatcatgagcgaataaatatgctgatagtttttgaccggcagatctcaaattcccagtacacattgtcgaggcatacggtaaaccattagttgttctaaatgtatttacttgtaaagaacaaactagaccaattgttacgttgcaaacactatagggaatctctttagggatgaatgcaatgatcgtcagaataataatttcaataattaagattaaatgttgccattcaacatattggacattacttaaacgatgcttaatgtattcactaataacaatacctaaaaagaaagctgatattggtaataaataatataaagcacctaaatagttttgctcagcgattttaagtcccataagaaccatgtttccagtttgggcattagcaaaaacattgccttttagaagataggtataaatatctaaaaagcccccaacgatagcaagcaagattcctgttaaaagtgattcatgaatcgttgcttttaaaaaatttttaattttcatcacgttaaaacatgtagcaggaatgctacatgtttattttataagtttagtagacgttttgtatcgcgagcaattactaattcttcattagttgggataacgaatacttttacttttgaattaggagtactaattaaacgatctccttgaccattaacatttgcatcttcatcaagttcgatacctaaagcatcttttaataaatcacaaattccttttcttgcaaagaatgaattttcaccaattcctgcagtaaagcaaattgcatcaacaccacctaatgcaataaaataacgaccaatataagcaataacacgacgatagaaaatatcgattgcaagttgagctctttcattaccttctaaagcagcattttgaacatctctaaaatcacttgacacaccagaaataccaagtagtccagattctttatttaacatcgtaataacttctttcatgtccattccaacttcttcaatcaaataatcgattacagaaggatcgacgtcaccactacgagttcccatcataattcctgcaagtggagtgaatcccattgaagtatttactgatttaccgtctttaacagctgttaaagatccaccagctcctaaatgagccacaataactttggaatgttcaggatttccaagcatttcgattgctcgttgagaaacatagaaatgactagttccgtgagcaccatatttacgtactttatagtctgtataatatttatatggaattggataaatatagcatttaggatctaaagtttggtgaaaagcagtatcaaatacagctacagctccagcttcagggattgcttccttaaatgcataatatccagttaaatgagcgggattatgtaatggtgctaatgattttaattcgtcaattttactaacaacatcttcatcaatgattgctgaagaatcaaagtatgatcccccttgaacgacacgatgcccaacacctttgatttcatttaactcttttacaattcctttttcaattaaagtatctaataaaagttgtactgcaactttatgatctttaattgggttagttgtaacagtcttttttccttgatatttaatcgtaaagattgaatcttctaatccaattctttcgattactccagatgtaattacagattcgtcatccatttcaaataattgaaactttaatgaagaactacctgcatttacagaaataatttttgccattttataaagcctccttaatctatcgtcattatatcatcattttgtaaaatttctagataaaagcattacgtttattaattttaatatagatttttttaatcattggataaaaagaatacaaattattattaataggtagatttttaactttaaagttagataaaatataaaaatattttttataaatgttgtattgtcgaaatattgaacgagtttaggcaatactgcacttgtagaagaaataatttattataaaggagaagattatggaaaacaaagtgtatggttatgcaagagtttcaacaagagaacaaaatgaggatcggcaaatgattgccttggagaattatccaatgtcaaggaaacaaatttatcttgataaattaagcgggaaagattttaatcggccgcaatatcaaaaattattaaggaaaattcgtgctggagatacaatcgttattaaatcaatcgatcggttgggacgtgattatgaagaaatacaaaaccaatggcgtaaaatcactaaagaaaaaaatgtaaatattgttgttttggatatgccattattagatacacggagtactggtgataatttaacgggaacattcgtggcagacttggttctacagattctttcttacgttgctcaaacagagcgtgaaaatattcgtcagcgtcaaagagaagggattgaagcagcacgaatgcgtggtgtgagatttggacgccctcgcaaagaaattcccgaaaattttgaaattttgaagcatcaatggcaacaaaatttaattgcttcacggcaggctgctaaagaattaggcgtttcacaggatacttttttaagatgggctcatggaaaataacattagtacatttatttgtccttaaaaggtagagattatcaagcatctattatgcggtcaaaattcgtaataaaatattataaaataacaaatttcacactataaaaacatatatattattttaatacatttgaacgatattgtctgatttatcgttctctatatgcaataaaagcatatgaatttcggtatatgcgtttagggagagaaacgcatatattttattttagaaaaggagaaaagcgatgggtctacttgaaaaaatagccgatattatgcagtgtacctatatttctgatttaagaggaagattatcgcttgaccatgaacagttacagtttttaaatgaattaagagctgaaacatacgctttgtctgaatggcaagaagcagtaaggtatattactggtaatttagattcttttaattcggcagcagaaggaaaaaacgtcttattggattactatattaaaaaagaagctacagaaatatcaataaaatgatttttttcttgatattataataagataatctataatagtatacgagccaggggtgcaaaattgctgagaagggcataagcctgatcccttatcatctgaactgggtaatgccagcgtagagagagcaaatttaaaattgtttgcttttttgcgttcgcaaagaagcattttttaattttgttaggctctttcataaggaaggggaaaaacaaatatgaaaaacaaaacatttaagattacaaccaaaacaattgcttatatggcgatgtttatggctttacaagtagttttagaattagcttttaaagtcgttccgggacagcctcagggaggaagtattacgctgtcattagtaccgatcctattagcctcatatttattaggtggatattacggtattgttgttggagcctgctgctgtggactgcattttgttttagggttggctacatattgggggccatggtcattatttttagattatttaattccactagctgtaattggtatagcatcattttttaaaaactttgagattaaaggtcatgtagtttatcctggaattattgttgtaatgattcttaagtttatctcacattatttatctggagcatggctgtttggagcatatgctcctgagggaatgaatccatggtggtattcatttggttataatttagcctattgcctaccaactttaattatttgctacatcggatttgccttaatatatccacgattaaataattcgattaaactgtaaaagaaaagtagcttgctacttttcttttcttctgtctttaaaaaggatagtaatttgtgtataatagtactgttataaagagaggtagtaaaagatgtcagattctctggtaggaaaaaaagtattaattcactgttataagcacgatggaagtattcatcgatgctgggccaaaggattcatcttagatgaaaatgatgatcattttattgcaatcaataatcgcaccttagtaactgaatctgatggtcgaatgtggcatacaagagagcctgccatctgttattttcctaaaaataagtggtacaatgtgatttgtatgattcgtaaaacaggagtttattattattgtaatattgcttcaccaactttatatgatggtgaggcattgaaatatattgattatgatctagatttaaaagtattcccagataataactatcgggttttagatgaagaagagtataagcaacatgctaaacagatgaattattcaaaagaattggatagaatattaaaaaaacaattagaactgctaattgatttagcaacgaaacgtgaaggaccgtttagtgaagattttacgaaacattggtatcatgtatatgaagatttgacacaaggataggagaatacaatggaaaaagtaattaaagtaaataaccttgaagaaacgattgctttgggtaatcgtttaggcttgttattacaaccaaatatgctattgactttaagtggcgacttaggagccgggaagacaacctttaccaaaggaattggtcaaggattagggattaccaaggttattaatagtcctacttttaccattttaaaacaatatcaaggtcgcttgaatttatcacattttgatgcttatcgtttagaaggacaggatgatgatttaggatttgaagaaatttttgatagtgatgatgtttgtgttgttgaatgggctaattttattgaagatattttaccagtagaccgtttaacaattgaaataaaaaaaattgatgaaaatattcgcgaatttgtctttaaaacaaatagtgaaaaatacgctcaagttgtggaggctttaacatgaagacaattgtaatggatacatcaaatgcttatttagttattggcttatacgaagatgatcaatgtattgataagtatcaagcagatggaaatcggcggcaatctgagtacgctttaacacatcttgatgaaatgttgaaaaaacatcattgggaagttttaaatgtggatgaaatgataattacgattggtcctggttcttatactggtcaacgggtcgctttgacgattgccaaaactttggcagcaatttcaaaaataaaaatcaaggcagtttcttcgttacatggttatgctggagcttctaaggcaatcagtgtaattgatgctcgaagcaaaaagatttttgttggggtatatgagcataatcaggccataattgatgatcaaatcatgttgattgatgattttgctaattttaaagaacaatatcctgattttcaagtgattggtgatagtgatttagtcggaattaacaaagttaaactcgatttaagtgattgtatttatcaagctggtaaaagtgttgattattgtcaaaatattgataatcttgttcctcattatttaaaagatgttgaggcgaaaaaaatatgttaatcagacggatggatttaggtgatattgaagaagttgtaaagttagagcatgatttatttagttcgccatggaatgaagaagcttttaaatatgaattagaaaaaaatgctttttcatcaattttgattttggaagataataatataattgttggttatataggaatgtggacactaggagaccaaactcaaataacaactatcggtgttagaaaagagttccaaggaaaaggctatgctaaaatattaatgactaaatgtgatgaaattacaaagcatttaggctattcgaatattaatttagaagtccgagtttctaatactaaagcaattagtttatatcaaaaatgtggctttaaaattgccgcaacaagaaaaaattactatcaggataatcatgaagatgcgtatttgatggtaaaagaaatggaggaataacggtgtcacttattttagcaattgaatcaagttgtgatgagatggctatggcaatcttaaaagatgaacgagaatttcttagtagtgtcgtggcctcacagattgatgttcatgcgatgtatggtggagtagtgccagaaattgcaagtaggaaacatgttgaatgtgtttcgctagtattaaaagaaactttgaataaggctaacgttacgattgatgaaattgatgctattgcggtaactaaaggaccggggttagttgggtctttgcatatcggtttacaggccgctaaaacgattgcaatggcttatcataagccattgattggagtacatcatattgctggacatatttatgccaataactatgttcaaaatattatctatccaagtctttgtttagttgttagtggtggtcatagtgaacttgtcttattaaaagctccttttaaatttgaagtaattgggcaaacccttgatgatgctgttggagaagcatatgataaagtgggacgagttttaaatttaccatatcctgggggacctataatcgataaaatggctgctaaaggtaatcatacttataatttaccagtgcctttggatgatgaaagctataattttagttttagtggattaaaatctgctgtaattaatttaaatcataaagcgatgcagcgaaatgaagaaatcaatcaagaagatttagctgcctcttttcaagatgtggttttatcggttttagtcaataaaacaatacgtgctactaaagaatatggtattaaacaagtattaatggcaggaggcgtgagtgctaatcgtggattgcgaaatgcgatgggtgaagcggttggccaattagatggagtagaattattattaccgccaatgagttgttgtactgataacgcaatgatgattgctttagcagcaaaacagatgtacgatttgaaattatttagtgatttgtcattaggaattaagccaaatttagatttagaaaatgaatcggttagcgggggaaatcaaaatggataaaaaaatatcaaacgctacaatgtctcgttatcctgtttatcttaaagctttaagaaaaatgcagcatgaaggtaaagaaaattgtttatcaagcgaattatctagtttaacaggtattcaagatacgacgattcgtagagattttacttatttatcaaagacagataattttggccaacgtggtaaaggttatgatgtaaaacatttaattgacggattaagtgaggtattaggattaggactagacgaatcaattattttgattggtatcggaaatcttggtagtgcaattttaaaatataaccgttggcaatatacggtgggaaaaattgtctgcggctatgatcaagataaaaataaagagggagagcgttttggtgttaaactctataatattgatgatttagaaaaaacttttcctaaagactgtaaaattgcaatcttggctatttctgaaaacgttcaaccaacagttgatcgtttaatggatttaggaattaaaggtatcgttgattttacacatacacattttacagttcgtgaaggagtcgaggtacaacaggtagatgttgttgtagcaattcaagaattagttattaagatggattcaaatcgtcaataatacttgaataatggataaaataaagtatataataggaaaaactaggaggattaatatgtttgaatttataacggttagagaactatatgaaatgtttttaagtaaccaaatgatggatttagaaggttacgaatatgttgaacttgagggatgggttcgaactaatcgtaacaatgggaaattgggatttattgctctaaatgatggtacatacttcaaaaatttacaagttgtatatacagaagcagaaatttctaactatgaagaaatcgataaattatctactggtagttcaattcgagtagttggaaaattaaagttgacacctgaaggaaaacaaccatttgaagttgaagcaactgagattgaaatcgaaggtaaatgtgatgaagattttccattacaaaagaaacgtcattcattcgaatacatgcgtgaaataccgcatttaagacctcgtgcgaacactttctatgcaatttttagattgcgcagtgttttatcaatggctattcatgaatttttccaatcacaagggtttgtttatgttcatacaccaattatcactggaaacgatggtgaaggggccggagaaatgtttagagcaacaactattgatggaactaattttgaagatgatttctttgaaaaagaggctttcttaacagttactggtcaattacatgttgaagcttttgcaatggcttttagagatgtttatacatttggtcctgcatttagagcagaaaactctaatacttctcgccatgctagtgaattttggatgattgaacctgaaattgcttttgctgatttagaggatgatatggatttaattgaagatatggttaaatattgtatcgattacgttttagataatgctcctgcggaaatggaattctttgcttcaatgattgataaagattgcatcaatcgaattactaaagttaaaaacagtgatttcaaacggatgacatacactgaagcaattgaaattttagaaaaagcagatgttaaatttaaaaataaagtttcatggggaatggatttaaatagtgaacatgagcgctatatttgtgaacaggttgttaaaggaccagttttcttgacagactatccaaaagaaatcaaggctttctatatgcgtttaaatgatgataataaaacagtggctgcttgtgatttattggttccaggaattggagaattagttggaggaagtcaacgtgaagaaagatatgatgttcttgaaagaatcatggatgaaaaaggaatgtctaaagatggtttacaatggtatatggacttacgtcgctatggtggctgtaaacatgcgggattcggtttaggatttgatcgtttcttaatgtatttaactggaatgcaaaatattcgtgatgttgaacctttcccaagaacaccaagaaatttaaaattttaacaaaaaggcctatattttatataggcttttgctttgaatgggttataataatagataaggaggcgatcaaataatgaatgagtatgatttaataaatgcttatctaaatttaatttttgatgatagcataacttattttagtcgcattcttgacgaatatcgtggtttatgccagttgagaaaatggatgcgtaaacgtggtattaatttaaaagccattgaaaatattggttatgatatgtttttagcttttagtaaagctaaaaatgctgaacaaatcatggaaaaaatggatccgactcatttagaagaattaaaagagtatattaatacagaacgtaataaatatcagatcgtagtattatcaagttttgattatagtgagccaattaatgcgtatttaacctcaaatcagattgtggatgatttagacagtgataatattagggttttaaattgtcataatctattaaaaaaagaagatttatcattttatggaccttttaaacattttgttacggccttatatcaaattgatcgctggcctggatttttaatttttaaaggtgatgagtgtgcatttgttcctatttatactactcaggacattgaagaagtcatttttaaaattgaacatgatacaattttttcaattcgatatttaagtccttatgatagcttttttgtgcagctaagtgatttacaccttggtagcaaaaagaagaatatcggtcgtttggcacttgaagatagtcttgatcaaactgttaaacagctacgttcttattatcctttaaagtttttgattacgggggatttaatgaattcaccaaatcgaaaaaatatgtatgaggcatcagggtttatgaaagggttaaaaaatcgttataatgcagatgtttcctttattttaggaaatcatgatgtaattgttaatggttttaatatttttaagcgtcagaaaagtaaagtaatcgcctttttgttaaatgaaagcattaaagtatttgaagaagaaaagattgttttaattaagattgattcaactgtagaaggtaatttagcgcgtggtaaagttggaatgaaacaattaaacaatattgatgaagagcttgccgctattaaaaatttaggagattatacaattgttgcaatgctgcatcatcatctgtttccaattacccgtgatgattttttaaagcaaaaatggcgtgaaaagatttttgttgggaaaattatggatagttctaaggcattagtagacagccgtgatttagtagaatggttaagaaaacaccaaattcagtatgttttgcatggtcataaacatttaccattttttagcagtcaagaagggatgtatgtgattgctgctggttcttcatgtggcagtggagcaaaagaatcaaagagtcgatatttaagttataatgtattaaaatatgaccatcgttataaacgatttaaatactgttttatcatttatgatgatatgacgatgcaagaccgtcaaagaatagttataaatattttttaggagagaaaaatgaagttagtagatggaatgaaagatgaaaaattagggagtgctttattgtattgctttactaaaggttatggagctgtaccgatggatctttataatcttgttttaccattattatttgatgatatttttagagaagaggtaaagataagcaaagattttagtagttgtattagggcttgtattcaaaaaaattctgaatttgttaatcaaattctaaatagtgttgaagaattagaagaggtaacgagtcgcagtttaggaatttctttattaaataaagatcttgattttcaaatcaatgatggtgtaatgagcggaaattgtcgaccatcaaaaattcttgatttaaatgaagctattattttaggaaaaatgatacaaggaaaaggttttgatgaagtagttacaatgatgaaaagtgattttaagattgtctttttggatagtgagacactgggtagtgatattgatgtcagcaaattaaatcgatatggtgatgtaacaatatatcatcaaagtcaagttagtgaggttcctgagcggattaaagatgcgagtgttgtaattactaataagcatatattgaaagaggaacagttaaaagatgctcataaattaaaacttatttgtgttactgcgacaggtgttaataatattgatcttgaatattgtaaggctgccggtataaccgtatgcaatgttaaaggctattcaacaaatgcagtagcacaacatacattcgctttattattagatttatacaataaaaatcattattaccataattatgttgagagcggtaattatgcatcaagctctatgtttacccatttaggatacactttccacgaattgactggtaaaacttggggaatcgttggaatgggcgatattggccgtaaagttgctgaaattgcaaccgcatttggctgtcaggttcaatattattctacaagtggaaaaaataaccagcaaaattatcaacaggttgattttgatacattactggaatcaagtgacattattagtattcatgcccctttaaatagtcaaacagaaaatctttttgaccaatcagctttcgcaaaaatgaaggattcagcatatttaattaatgttggaagaggaaaaattgtaaatgaagcagatttagttgaggcattaaaagaacatcgcttagcaggagctggcttagatgtttttgaaaatgaaccattctgttgcaacagtcccttattagaaatcaaagatgcaacaaaattaataatgacaccacatattgcctgggcaccaattgaaactcgtaatcgtgtgattgaagaggtttgtttaaatattgaaggatttaaaacaaataatttacgaaacgtttgtaatatgttataatttagttctagtcgtggtgaaagattcgcttcttttatcatatattggagatagctttgctatttccatttttttgatttattgattttaaaacctttttataggatttaaactgcataataaaaatgcataaagtcttttctttgtttataatataagtgtaaataaaggaggaactaaaaatgaaatatgctgtagtagatggaaaattaacacatgtaaataaggttcctaaaggaacaattgcaagagaatttggttattctaattatcctgtaattgcctgcaaaggaaaatatcgctcatattggaaatatgtaagtgttaataaagcaaactatgcctaattcaaactctcatcgaaagatgagagtttgttttgatttaaaaacaatttattgcatttcatgtttaactaagctagaattattaagaaatattaatagaagggtttaatttcatgaaagaaagagaaaaattttcatcaagattaggttttatcttgatatcagcagggtgcgcgattggacttggaaatgtatggcgttttccatatgttgttggtcaatatggtggggcactatttgtattaatttatttattttttttaattgctttaggagcaccaattatgacaatggaatttgcagtcggacgtgcaagccaaaaaagtgcggcattagcatttcattcactggtacctaagagaaaattttggggtgcaattggaaaatttcaaatggctggaaattatatgttgatgatgttttatacaaccgtcggaggctggatgattgcttatttttttaaaatgataaaaggtgactttaacggtattactccagcacaagttggagatatatttaataattcgctccaagatccatttatgcaagtattttggatgattgtagtggttgttttgggatttggaatttgttccttgggccttcaaaatggtgtagaaaagattactaagatcatgatgagttcattattaattattattttgattttggtgatacgtgctgttactttacctggtggtagagacggtttggcgttttacttaattcctaatttagcggcaattaaacaatatggtcttttagagattatttttgctgcaatgggacaagcatttttcactttaagtttaggaattggggcaattgctatttttggaagctatattggcaaagaacggcgtttatttggtgagacaataagtgtatgtactttagatacgttagtggcattattatcaggcttaattatttttcccgcatgttttgcttttggagtaaatcctgaaagtggaccgggtctggtatttattacgttgcctagcatttttaatgaaatgtggttaggacaagtatggggatgcttattttttgtctttatgagtttcgcagctttatcaactataattgcagtatttgaaaatattatttcatttgggatggatttatttaattggagtcgtaaaaaagcagttgtagttaattttattattattttaattttatctttaccttgtgcccttggctttaatattcttagtgatattactccatttggtatcggaacaacaattcaagatcttgaagatttcttggttacatataatttcctgccacttggttcattagcgtatttgttattttgcacatgtcgttatggctggggatttgatggttttctccaagaagctaatacaggaacaggaattaaattcccaaaatggacaaaaaattatttaaaatttattcttccttgtgtgattatttttatatttattcaaggatattatacgtttttcattaaataattgtttgataaaaggtgttgctttaagtaacaccttttatgcaagttatttgttgaatttttataatatttgattgttctaaccgataaagagtaaatatgcaatagttgcaagaaggcaagcaatcgcatcaagccaaagacctaattttaaggcgtatcgattattttgaagttttatactgccaaaatacaaggttacaacataaaatgtagtatcgctgcctgtctgaataatggagccaagaatgctataaggatgatcaaccccatactttaaaaagatattatttaaaatagttagtgatccatttgaagaaaatggtctaacaatcatcatcataaagatatcaataggaatattcaaaatagtaaaaatactcttaaaaccgatttctagtagttcaattaggccgcaatactgaaaacatgtgacccatagtgtaaaagccatcattgttggaaataaagtaattaggagtttactgccttcctttaccccttcgataaattcattaaaaatatcaacgtgtttaaaacttgcttcgactagagctattaaaatgataattaagattacactatccataatgttcaatcaccttacttgcaataataccgacgattgtaatgacgaaaccaatagtaagactatagccaaagaagccaaggatgtcgtggctgccataactttgtcttaacgtcatcattgttgtaggaatgattgaaaggccagtagtgtttaaaataactaaaagcatcatttctttgcatggagtctttggatcacgttggtattttgtcagagattgcattgcttttaaaccactaatagaagccaaagaaccaactcctaataaattagcaataaaattagttgagagatatagataaacttgatcatcttcgaccgtattaccatagataagttttaaaatcggcttaagtaaaaacgataattgtttaataagtcccgaagctttaataatatttaaaaacccattccaaagacaagcacttaaaacgattactttgattaagtcaaaaacttgttgtggtgaacttaaaattgcttcaaacattttattttgattactagtgcaaaaagcaattatcacaaagaaaattaaaccaaatttaaaaactttagccatagaataaatccttcaggaccattttgaaacctaaaaagtaattgtatggaacaactttttgtttagcaattggctggttatttaataaaatcacaatttcattattatttaatgaaacttcaactttatcagttggttttttattaacatagacatcaaagtctaaatagtactgttgctgtttaaattcaacgataccttttgagaatattttagttgcttttaaattagcataacattcttcaaatttcttttgatgaaattcaaaatcatttccacaattaaaagtaacaataattaaatcaagatcatctttacgagccatggtaattagggttcgtcgtgcttttttggtaaaaccagtttttccaccaatacaatattcatagttggttaataatttatttttgttatgccaagtcccattaccgtcttcgcgtttgtattctttagtactgacaatttcattaaaaattggattttgatggcaataggccattaatcgtgccatatcataaacagtggattgattcccgttatcttcttcatctaaacctgttggattagaaaaagttgtgctatgcaactgaagttcttttgctttgtcattcatcatatcaacaaattttggaatttctttaccaactgctttagcaatcattacagcagcatcgttgccacttctaagcatcaaaccatatagtaagtcacgtagactgattttatcacctatatgtatatagacaccacttccccaggctttatttattgtatcatcaactgtaatgatagtatcaagttccatgttttcaatcgcaataatacaggtcataatttttgaaattgaagcaacgctctgaatgtaatcttgattactgccttcgattacgatttgatgactagcttccatgacaatataactttttccttggaagggtacagcactgacgtttgtatttactagtgtcatcattaaacttataattaatcctaatttcattttcttcacccctttaaacatatgttgaacttggaaaaatagaagttttagagtagaaaataaaactgtcaaaatatcctaatatttgtaattataatattaattgtattaaatctaggtaagatatataactataagcattgaatttgtttcaataacccaaaatttaatattagtctttgtggcatgaggagaatccctaccgatggttacagttcatgacccatattttataatatggctgagttagtaaaattctaatatcgacggttaaagttcagatgagaaaagacattttctagaattctatcgaaggcattttattatgttttcggttttttattttaggaggaagaaagttgaaaagaggaaagacaaggtgattagtgttgaacgcaattttaggggcattataggcgatgctgatggtattttgattcccattacctttaataccaccatttttatattttgatacagcttatgtttacaggtgaattacaaagttttatggttaagtattgctttggtttaaccagcagccttgatctatcgttatgataaaactaaaattgttacttttaaaggaacgtgggttgaaattattattaatgtaggagttgttctctttaatttaattaaaagtattattgtatatttgattacattattggtatataaaaaactaagtactataattcatcatacaggtgactaaaagaaaagagaggtgatttttgaagatggagctgttttattttttaaaaaattaggaaattggaaaattatgtattagcgactagtgtagatgattatgtaacggttcgtaatattagttgtttattttaaaacagataaaaattttagaaaaactcaacaattatttaaaaatcctcaagttgcattatgcaatggaagaattcaaatagaagggctgacgaaaaatataggcttagtgattgaaaaactgggacgtaaatttgagcagttatatcgtcagtatttatgacaaaattacaatgcgtatagttatgaaaaacagagattttaattgaggctacacctaagttcgttgaaatttgggatgaaaatgaaaatcattttacttttcaaacttttattgattttgaataaaaacagttacaataaaaaatgtgattaaaggctaaaaaaacaaataatcccttgtcgttcgacaagggattatatcattaaattttagactttatttatattcttcaattagtcgttccaaataatctttatatttagaatcattggcattaagtttatcagaactattggtatatttttttactgcggttgtagctctagtgattggtaataaagttccagctccagcaacacaaccaccgggacaagccataccttcaagtagataaccgtcatatttaccactttttgctaatttaagcatttttttacaatttgctaatccttctgctgattccactaatacttcacgttcaggctctttagctttaatacaatttacgactgctttagcaaccccaccgctaacggcaaaaccgcgaccatcactactagcctgagtaaatggatcagcttcatctggttttaaagaagcaaaatcaatgcctttagcttcaaacattgcgccaatttcttcaaatgttaaaacaaaatcaacctcacttcgtactgattttctagaagcttctagtttttttgctgcacatggccctacaaaaacaactcggctattaggatgtttttcttttatcaaacgagcggttaataccattggtgttaaagccattgatatataagatttaaattccgggaattcttttttggccatcattgaccaagaaggacaacatgatgttgccataaacggttgctgagcaggtactttttctaaaaagtcctttgcttcatcaattgtacataaatcagccccaatggcaacctcaaccacatccttaaaacctaattgctgcattgctttttttaaaacttctggtgtgactttaggaccaaattgtccaataaatgcaggagctactgctgcaataatttcatcgccggccttaattgcttgaattaattggaaaatttgacttttatcagcaatggccccaaagggacagctaactaagcacattccacaagagacgcatttatcataattaatgtgggcattaccatattcatcagtttcaatagcatccattccacaagccttagcacatggtctttctctttttaaaattgcatcatatggacaattagttttacaaagaccacatttaatacatttatcttgatcaatatatgctttcccgtctttaaagctgattgcatttttaggacaaacttcgatacatgggtgcgctaaacaggcctggcagccactactgacctcaaatttcttttctggacatttattacaggcaaatttaataatgttgattaatggtggttcgtaatatttgtcggcaataatactttcttcaatccctttagatattggtgctggttcatcaatagggcgcaatgataatcccatcgttaaacgaattctttcaccgacaatagctcgttccaaaaaaatactgtcacgataagttgcgacttctccaggaattactttatagggtaaattttcgatacgactataatcattcccctcataggctaactttgcaacttcaacaaaaactttacgtcgaattttagttaatgatgaataaattcctctcatagtgtttcctccatattatttataactatattttactccaaagtgcaagtttataaaagtgaactgtaggatatttatataaaaataagttattcgtaagataattggttgcttttaattgacaattcagtataatgattacgaagtaggtgaaaagacatggaaagattacaaaaagcaattgcggcaagtggttatacttcgcgaagaaaagcggaagacttgatcgttcaaggaaaagttgaagtaaatggcaaagtcgttactgaattaggaaccaaagtaaaacagggagatttaattacagttgaaggaaagccgttggttggtgaaaataaagtatattatgttttttataaacctaaagggtgtgtttgtactttagatgatgaatttgaccgacctattattacagattattttactgaagttaaagaaagaatttatccagttggaagactagattttgatacaacgggattaattattatgtctaatgatggagaatttgctaatatgattatgcatcctcgttcacatttagaaaaaatttatgaagtatctattaaaggtttaattactggaccaactttaaataaactggaaaagggtgtttatttagaaggggttaaaactttaccatgtaagattaaagtcgttgacaaagataccgaacataaaaccacaatgctgaaaataaagttagtagaaggtaaaaaccgacaagttaagaaaatgtttgagagtgtaggacatccggttaaaagattgcatcgtgtaagtattggtggaattaatttaaaagggctaacaccaggaagatatcgtattttaaaaccgcaagaagtaaaagatctaaaaaaattagttaatacggataagtagatcacttatccgtatttattttgacaattattttaatttgtttggtgcatactgtattttgggtgatgaaaatgagaatacaaatagttgaaccacaaaataaaattgaatgtggaatatgcaaagccgagggtgattggatcaaacgaataaatgtacgggggattcaagctttatattgtatcaagtgtgacacagtgacaatgtttaataagatgccatcaaagtttgtttataaggcattaaaaaaagaaaccgaaaatattcggatggcttataatttaaaacaagacgaaaaagttaaataaacaaattagttgactttaatcaataaatgagtagaattagtatagtaaatagatgcgatgatttaggatatgtctagataatactttgattcagagaaaagacgggtggtgcaagtcttgataaggttatttaggtactccctaatatgcaacactcgaaagagaatgtcggtagtgcgttatagctttgaggttatttcgataacaaattaaggtggtaccacgatactctcgtcctttggatgagagtttttttattaaaaaacagtaaaggagaaaaataatgattgattttaaagaagacgaaaaactaagtgtattaaatcactcttgtgctcatgtaatggcacaagcaattaaacatctttatcctcaagctaaattttgggttggtccagttgttagtgaaggattctattatgatgttgatttaggaaatgatgtaatcaaagatgaggatattcctaaaatcgaaaaagaaatgaaaaagatttgtaaagatggcaaacgtattactcgccaagaaatttctaaagaagaagccttagaaatgttcaaagatgatgaatataaaatagatttgatcaataattttgaaaatgatacaactattagttgttatcgtcaaggagattttgttgatttatgtagaggtccgcatgttgaaacagttaaagcttgtaagaactttaaattgactaaacattcaggtgcgtattggaagggtgacaaagaaaataaggtactacaaagaatttatggtgtttgttttgaaacttctgaagacttagctaaacatcttgaattattggaagaggcaaaacggcgggatcataagaagctaggtaaagaactaggattatttatgatgagtgaatacgctcctgggatgccatttttcttaccgaaaggaatgattttaagaaatactttagaacaattctggtacgaagaacatgctaaagaaggatatgaattcattaaaacaccaattatgatgtcacgtgaattatgggaaactagtggtcattgggaaaattataaagaagatatgtatactagtatggttgatgaccgtgaatttgcaattaagcctatgaactgtccaggaagtttgttagtatataaaaattccttacattcatacaaagatttaccattaagaatgggtgaactaggtcaagttcatcgccatgaagctagtggagccttgaatggtttatttagagtacgtacttttactcaagatgatgcacatatctatatgacacctgatcaaattgaaggtgaaattataaggttgattaatttcattgatcgtgtttatggaagcttaaatttaagttatgaaattgaattatctacccgtcccgagaagaaatatattggtgatttagcaatctgggaaaaaagtgaagctgctttagctgccgcttgtaaagcagcaggtaaggattataaagtaaatcctggagatggcgctttctatggaccaaaactcgatttccatgttaaagattcattagggagagtttggcaatgcggaacaattcaattagacatgaatttaccagagagattcgatattacttatattgatgataaaggtgaaaaagttcgtccagttatgctgcatcgtgttatctttggatcgattgaaagatttattggaattttaattgagcattttgctggtgtgttcccattatggttggcacctgttcaagttaaagtattgccggttaataatgagtatcatttagactatgctaaagaagtaactgagttattaaaggataaaggctttaaagttgaactggatgctcgtgaagaaaaattgggttatcgaattcgtgagggacaaatggaaaaggtaccttatttattagtattaggtaataatgaacgtgatgaaaaaactgttacatatcgtaaacatggagagcaaaaacaaattactgttccatttgatgattttgtcgcaatgctaaatcagcagattgttgataaaaaatagtaaacacttagcaaattaaatttgctaagtgttctttttggtttgataaacttctattttatagatgcgtaattaaaattattagaataaatttacattatttatatttcgaagaaagatatagatgtgatataattaaaatattgaaaagagggataaaaagatgaaatattatttagcaatggatgttggtggaacgtcaataaaatatggtgttgtcaatgatcagggaaaaatcattaatactgataaaatcgtaacgcccgattcactagaaaaaatgtatcaggcaatgggtgagatttatcataattgtaattatgaagtagcgggaattgcattaagcatgccaggtgccgttaacagtgaagttgggaatattgaaggagcaagtgctttagattatatccatgggccgaatatcaaagaggatctacaaaaacgcttcaacacaaaagtttcaattgaaaacgacgctaactgtgcagcattagcagaagtttggaaaggatctggaagtgatgtggatgactgtatgttcattgttagtggcactgggataggtggtgctgttgttaaggatcgaatgattcataaaggaaaacatcttcatggcggtgaatttggctatatggtggccttaaatgatcttgataatgattcctatatttcttggtctactgcaggttctacagttgcaacagtaaaaggggttgctaaagaattgggagttgattatcaaactttagatggtaaagtgatttttgatcaagcacaagacaactctatttatcaaaaatatgttgatcggtactatagtgtcttagcaatggggatatataatcttcaatatgtctatgatcctgaaaaaattattattggtggagcaattagtgtacgacctgatttaattgaacagattgaaagtcgtttagaaaaaatatatgatagtattcctgttgcaaaaattcatcctaaagtagttaaatgccgttttggaaatgaagcaaatttaattggagcagtttatcactttattcatagctagtcattaagaattcatattattgtattaaaatattattaaataaaacaaggggaggtaaaaaaatgaaaagagaagcaccaaaaatcaacacacagctaagaagccatacaattatggtaccagagtgtatccgcaatgccagtggaatagttattaatggcaaaagaattaaatcattattattctcaacagatgttgcagtaatatccaattgtaatgctgatgctgtaatcgcggtttatccatttaccccaaccatgcaaattactaattcaattatcgatgtagcacaacgtcctgtttttgcgggcgttggcggtggaacaacagcaggacctcgagtgcgggagattgctttggatgcagaattacatggtgcaactgcagttgttttaaatgcacctacaaaaactgaatttattcaagaattatctgattatgttgatattccagtagtattatcaatcgtttctttagatgaaaatcttgaggaacgcatgttacattctggagcgacaattgttaatgtttcgggtggtaagaatactgttgcaatcgtcaaagcattaagagagatttctcaagattttccaatcattgctaccggtggacctaatcttgaaacaattcaggcagttattgaagcaggtgcaaatgccattacatatacaccgccttcaaatggtgaaatttttaaagcgatgatggaggactatcgacagcgttgccaacatcaatgatttgttttgggtagattgatatctaccttttttgttgttcaaactggtattttattgtacaatagttgctgaggtgtaaaaaatgaaacaatatctagatatgtgtaaatatgtattagaaaacggagaaaatcgcgaggatcgaacaggaacaggaacacgtagtgtttttggatatcaaactcgttatgatttgagagatggtttcccgttgatgacaactaaaaaaatgtttttgcggccaattgctgaagaattattgtggtttattaagggtgatacaaatatcaagtatttagttgatcgcaatgtcaaaatatggaatgaatggccatatgaagattttaagaaatcacctgattttaatggtgaaacaattgaagagtttgtagaaaaaattaagacagatgatgaatttgcaaaaaaacatggtgatttagggccggtatatggcgctcaatggcgtgattttaattatgaaggggttgatcagttagcaaaattagttgatagtctgactaacaatcctttttcaagaagacatattatatgtgcatggaatccagcacaagtagataatatggcgctgccgccatgtcatgcatttttacagttttatgttagtgcagataaaaaatatctgtcttgtcaactatatcaacgtagtgcggatatttttttaggggtaccgtttaatattgcttcgtatgctttaatgacggaaatgttagcgagaacttgtggatatgaagcaaaagaatttatccatacgattggtgatgctcatatttataaagatcattttgaagtagttaaacaacaaattgcaagagaaccattaccaaaatgtaaattagtattaaatccagatgtgaaatcaatttttgattataagattgaagatattaagatagaagattaccaaagtcatggtaaattagttggaaaggtaagtgtataatgataaatataattgttgcaacagatgaggatctgttaattggaaagaaggattcacgaaatggaatgccttggaatgttccggaagatttacaacattttaaggcaacgactttaaataaaacaattttgatgggattgactacatatcaggcaatcggacgtcctttgcctaatcgtaaaactattgttgttagttttgaaccgtttgaagatgaacgagtagaagtgagaagctcattagaagaagtaatagaagaataccgtagtagtggtgaagatttatttatttcgggtggagcttcaatttataaacagtgtttaccaattgcagaccagttgttaatctcaaggattcctggaaaacatgaaggtgaaacatattttcctaattttgatgaatacggttacaaattggttgctcaaaaaccatttgagacatttacattagaaacatataagcgaggataattaaatgaagagaattgcattgattgttattcgtgttatttggcggttaccatattggtggggatataaagtcaataagtataaacatattgataaatattctgctgatgaacgctatgggtttatacatcaagttgtagcaattgtaacacgcaaagcaagggtagagctagagtgttatggggtagaaaatttacccaagaaatctggttattttgttgcccctaatcatcaaggattgtttgacccgctagcaatttttcaaacccatagtcgtccaattcgagcaatcgtaaaaaaagaattggcatcagtcattttagtaaaggatgttattaagatgctggaatttattccgatggatcgcagtaatgtccgagaaagtgcaaaaattattaaatatgttgctaatgaagtagcggcgggaaaaaacttttttgtttttccagaagggacaagaagtagagacggcaataatattttagaatttaaagggggaacttttaaaattgcgactaaagcaaaagcaccaattgtgccggtagctttgattgattgttataaagtatttgataataatacgataaaaaaaacaacagctcaaattcattatttaaaaccaatttattatgaagaatataaagatcttcatactaacgatattgctaaattagttcatgatcggattgaaaaatgtattaaagaaaatgacaaaggatagaaatatcctttgttttatgttataatctatttagaaaatattctaaatagattggagtgatgattgtggggtttgcagaaacatttaaggcactttcagatccggttcgtcgtgaaatattggtgttacttaaagatggtaaactctcagcaggagaaattgcaggatgttttgaaatgactcaagcaacagtatcttatcatttatcaaaattaaaacaagcagatttgatttttgaaaataaatacaaaaattatatttattatgaaattaatacttctgtttttgaagaagtaatgttatggcttagccaatttggaggatttaaagatgaaacttaaaacggcattaattacatgcggagtatgtttgctgccgattctatttggactaattatttatgattgcttaccagcacaaatgctaattcattggaatatagcaggtgaaatagataattatgctagtaaagagatttttgtttttctattaccgatattgatgagtggaattcaactattgtgcttgtttatgatgcaaatggatcctaaatacaagaattattcatctaagatgttaaaaattgttgtttggataattccaacgataacaatttttttagaagcaataacatatgcaatcgtatttggatatgaaatctcaattaatatagttgttccaatatttttaggaatattatttgttattttagggaattatttacctaaatgtcgtcaaaattttactatgggctaccgattaccatggactttgaatgacgaggataattggaataaaacaaatcgtttagctgggtatgtaatggtccttgggggtattttaattattattatgagtttctttgatctggctttttgggcagtaattttgtttgttggagcgattttaataatcccttcagtgtattcatttttactctatcgaaaaaaataataaaatagatgattcgatacatttttatttaaagaattaaatagaaatgtatctttttagatgctttgtttttttatttgaagtacaataagagtaggagatgataatatgggaaaattggaggatttaccaaatattggtaaggtagtagcacaacagctgatacaagtaggaattgatgatccgataaaactgaaagaagttggagcaaaagaggcatggttaaaaatacagcaaatcgatgaatctgcatgtattcatcgcttatatgcactagagggggcagttgagggaattaaaaaaacgcaattagattatgaaacgaaagcagaattaaagcaattttataatgagcataagttatgaaaatattagttaatggtattgagttattttatgaaatatcgggtcagggacggccgcttattttagttcatggtaacggtgaggatcatcatatttttgatgcattagtggccaaattgaaaaatcactatacttgttattgtattgacagtcgcgggcatggtttaagttctagtgtagctgtatatagttatcaatcaatggctgaggacataattgagtttattaaaagcttaaaattatcggaggttgcctattatggttttagtgatgggggaatcgtcggattattagtagcgagccaaagtaaactgataaaatatttaatgattagtggtgctaatgctgaccctgatggcttaaaaaattgggcttattatttgatgaaaatacagtattatttaaaaaaagatgtaaagattaaaatgatgctggaacaaccacatattaatgaatatcaattggctaagataactgcaaagacgctaattttggtaggaagtgatgatatgatcaaagaatctcatacgttatatctcgctcacaatataagtggaagtcaactaataatcttgcctaatgaaaatcatagtagttatattattaatagtgcaaaacttgcgccaattattttggcatttttaaaagtcgcttaatgaggtgaatacaattttttggacgctaagttagttatattattaataaggattgattcttgttaagtagacaaatgaaataaataaaaagtgtgagatgttttactgatttggtgaaatgtcttttttatatcagtatataattattgtgtaaaattcttaaattatcgaaatactcttgaatatgtatatcttcttttataggatactgagttggttccttgactgtatctaaagctataaagcgtacttctggtggtgttatatttttgaatcgttcttgtaacttttgttattgtagaaatttatataggaattaatggattcttttaatccttcataaacatgaaatttctttaaatcatgcacattgtgctttcctagcttatacccttttgataatgaaataagtaatattccttgtatttgtttaatatagataccaattttttgctctgttgttggctttgctataataaaaaccccaaaagttggttatatccagctttcggggtttgcttcacaatgtgacttttttaaataggcatttaattcttcaatatttggtaagccttcgttatctccaagtgtttgaacttgaatcgcgccaattgcattcgcacgaatcaacatatctttactacataatgcttccaaatgacctgaaataattcctgctgcaaagccatctccagcaccaactgtatcaatcactttttttacattaaatccaggaactgttaaagtttcatttttactgctgtaataagcaccttgggaaccaagctttattacgagttcatcacagcctagctggtgataatatacagcgattttttcaggatcatcactgcccatgagaatttttccttcgttattgcctggtaagaacatattacaatatttggccatttcattagtggtatcgatcattgttgtttgattaggccaaagagatggtcttaagttcggatcaaatgaaatataaagaccggcttcacgagctttttttacaagccttaaactagtttctcgagttttagaagacagtgctagggggatacctgtaatatgtaattggtcaaagtcatttaaattgatttgatcaattagattagtgtcaatattcgaaaaagcagaaccttgacgataatagtaaatatcaggatcaccctcaataacttgatttttcatcatcattccagttggaaaaagactattatagtaaactaatcttgtatcaattccttcttgataaagcttttttttaatgtaatgaccccatggatcatcacctaaaacagttaaatacgtagcttgatgccctagtcttgttaatccgatagcaacattaacctcggctccagctagtgtctttttaaacatctcggcttcatctaatgaatcatacgatgttgttgtaagcagagccattggctctccaaatagtaatatttttttcattttatccctccagacataaatgacatttacaaccgcttattagttcattaaaatagataaattcgattttatttttatggttgtaacgagcagtttgcatatcaaaagtataaccttgtttttctagaaagaatattgcccgttcaatactcttggttgacaaacataggtggtggagggaaccactaggcgtatcaaacataaattctatttcatctaccattcttgaaatagaaagatttttttgatgaggactattgattagagccgctaattgagcacctcgatcaccagctccgattccaacatgatgaaatttaatatctagcatggttttaactgcttgtttagtaatagcagtaatttcatcccatttatgttctttaattaattcatcgctgaccatccaagtcccgccacaagcaataattttatcaaatgctaaatattcagttaaattactagtgtttattccgccggttggcatgaattttaagttgcaatatggcgctgacattgccttgattgcgggaagcccaccatttgcttgagctggaaagaattttactacatctaggcctaattcaatcgcctgctccatatcacttgggttggcacaaccaggtaaaataggaatatctttatcaagacaatattgaacggtcttgggattaagaccgggtgaaacaataaattcactaccagcttcaattgctgaatttacttgtgctggatttaaaactgtaccagcaccaataatcatttgtggacaagctttcttcatagctataattgcttctttggcacatgcagttcggaaagttacctcagcaactggtagaccgccttcgcataaagctttggcaagatatggagcatcttctaaacactctattttaattactggaactataccatataatgatatatcgttgattattttattcatgttattatcctttcatttttccgccattcattggtgaagtagcaagttttgtgtagattgataaaattccatttttatattttggttcttttggcttccatttagcatggcgctcctttaatatttttgtaatttcttgtgaggtacgttgttttccttcaattccaataatttctaatcgacgttgaggaacatcaattttgatcaagtcattttcctcgattaaagcaattggtcctccctcactagcttctggtgagacatgaccaataactggtcctttgctagctccagaaaaacgtccatcagtaattagtgcaatactcttggctagttcctgatcagaactaatggcttcaccagtatagaacatttcaggcattccactacctttaggtccttcgtaacgaataaatactgcatcaccgggtttgatttgttttttgatgatcgcgtcaatggctgcctcttcgctatcaaatgggcgggccctaagaacagcttgcatcatttcttgaggacatgctgaatgtttgattactgctccatctggtgctaaattcccttttaaaatggcaattgttccatcttttccaatgggatcatcatatggtctaataatatcagtgctttttagattgatcttatccaaaaatgtttggcaattttcatagtaaccattattttttaattcttccaaattttcacctaaagttttaccagtaactgtcattacatctaaattaagattctctttaattgcttccatgaccgctggaacaccacccgcatagtaaaaatattcagccgggtattttcctgcaggacgaatatcaagaagataatgtgcattttgatgcatctgatcaaataaatcagcatttagatcaattccaaactcacttgcaatagctggtaagtgtaacagtgaattagtacttccagaaattgctgcatgaaccataattgcattttcaaatgatttcatggtgacaatatcgcgagctgttaaatccattttggctaatttaattatttgttttcctgctttataggcctgctcttttaaatctttacaagtagctggcattaatgctgtaccaggtaacatcaatcctaatgcttcggtcataatctgcattgttgaagcagtccccatgaaactacaagctccacagcttggacaggcatgatgctgataatactcaaattgctctttggagatttcgccacgtaaatacatggcactatattttccgatttgttctaaggttagcatatctggaccagcttccattacacctccagttacaaagatacaaggattgttaattcttccggctcccattaagtgagcgggcatacctttatcacaacttgcaacaaaaacactgccatcaaagggagttgcattattgtgaatttcaatcataccagcaatcatatctctagatgctagagaataattgataccgtcatgcccttgtgcctcaccatcacaaatatcggtagtgaaaaattttgaggctttagcaccatgatcattgatccctttttcaacctcatagactagatctaaaagaccaacacttccggggtgggagtcaccgtaagtactttcaatcataatttgaggtttgcttagatcggcaacactccatccagtaccaatccttagtggatcaatttcaggtgcaattttacgtaattcctgtgatttcattttatcctcctatgacgtatgacgtcttaaatataatttaattctaaaaggcttgatgatgtttgtcaatagcgttaattaaaattgacaaaaataataaaatgtgtaagaatttataggcgaggcgagaaaatgaaaaaattaggaagtaaaaaaacgctgccagagttggcagtagagcaaattattggctatataaacgaaaatggtcttcaaccaggtgatcaattacctaatgaagttgacttaatgaataaacttaaagttggacgtggaacgatccgtgaagcgattaaaagtctaaattcaaaaggagtagtaataattaaacgtgggattggaacttttgtggctgatcagccaggaatcagtgatgatccactggggtttacttttgaaactgataaaactaaagttttaatggatgctttggaggtccgattgttgatagaaccgcaaatgattattaaaacaattgataatattagtgcaaaacaacttaaggaattatcagacttagctgatgaaattgaaagcttaattaacaaaaataaagattatactgtacaagatattgaatttcatactttattagctcgggttagcggtaatcgggttattggaaaattaattccaattattgctggagcgattgaacaagctatcgatgtaactgataaatcccttgtccaagaaacaattattacacatcgtttgattgttgaagctgttgctaataaagataaagaaggagctagtaaagcgatggctagacatatccaagataatattgatatattaaagacaatttaaaaaaagcttagtaaagatgagatatcgtctaaagttagattcgataactaacgatcggagattgattgaataaactaagcatttttatttataaggaaattatttacaaatagataactaatcaatgctgcaaggaatttgaatggggcataataaagaatagggataaccaaggggaaaatatttagtagtacatcgataatttactaatttatgatagaaaaaatagcctaaagtaataaagaaagaggcacagctaggcggcataaaccgttgttaataaggatatatagattaaaattaagtggtttgaataatttgctatgaataacaattactttaattgctatgagtcggcggattaaattaatacttttattttctatggaactgattctccttttatctattgtaggcacaaaaaagaaagcaattactatttgctttctataagacgattaattcttttctgtttttcactggttaaaagggcctcaggatcattaaggtattggattaaaaggtcagcattttttattaattcactatatttatcatcaattctttctttatttgaatgattttttattgctgttacaatagtatctatttcatttgctgaaaagagttcatctttttttaatagttctgaggcaattaaactactacgattagcgtgatcaaagctagaattcaatttatatgtagcaagatcatgtaaaatgccgattgttgcagcaatttctatatttaggttattttggattgctagatatttcatcattgcagcaacgctaaataggtgttctaaaccatgtttacgcttattaccaaagcaattagtgtttaaaatttgataaacttcgtccttgattatctcatatcttctcatcgtcttaacccctttggaaaaagattttttacttgattgttactttctttgtaaaatgctaatggataaccatcgacaagaatcaatccataacctttttggttattaccgattagagtttctccgtgaagatatttggaaatatttaaatcatcagctttaaagttataatagcgtttaacatcttctttttttaaagaaagagccagagaatgacttggttcaaaacgcccttttttacattctcctaaatataaaccattacgtaagacttttgtcccctttagatctgggaattgcggtaaaattgcataaatatggttattagaattatataaatattgggggactggaaggtttaagttattgtgataaaatttagtaacaagatttaattgatctttagtaacattcggttttaagaaatttattttttttgttgaaccattagtatgttttttcaaaagagcaataaattgcccctcacctttattaagatgaggatacattcggacaactttatcattctgataaccagaagccattcctggctgtttttttatttctaataactccatttgtaaatcattggtcatatatttaacttgatcttcattttcttcaagcgaataggtacaagtggagtaaattagaataccttcatctttaagcatttgataagcgctgttaattaaatttctttgaatataagcacactcatttactttttcaattgaccaggtctctactgcttgatcaagtttacgaaacattccttcgcctgagcaaggagcatcaaggatgatcttatcaaaaaaattattaaaatacttttctagtttaactgggtcgctattagttacaattgtattttgaagaccaaaacgttcaacattttcagataaaataccagctctaagtttattgatgtcattagcaatcattaaaccagcactacttaacttactagctgtaaagcatgtctttccaccaggcgcggcacacatatctagtacataatcgtcatgatcaaagtcaaggcagttagctactgccatagcacttggttcttgaatgtaatataaaccacagttaaaataaggatgttttcctaactgataattttcataatcataaaaataagcatcattgatgtagggatgtttggttaaaaatgctgaatttaaatgttcaatacttccatgctttaggggatttaaataaaaacttttaataggtttttgatttaatgcggattcaaatgcaggatagtcattctgtaaaagcttttgcattcgttgttcaaatagtttgttcatagttcacctcttttttattatacaagaattataaataaaaagacaagcatcgcttgtctttaattatttttcattaataatatgacttaattcagccagtcgatttgctaaacggcttaattcttgaattggggcttcaagatataaatcaacatcaattttctttattgcttcttcgtgtttagcgttttcttgtaaaccgactaatgtttctgttgtagcgtctaatgaagtagtaatttcatttaattcgctaataatgttttcatattccataatattacttcctttgtccataattttgttcatccctatattttatactaaaaatacgttatttttattcattcgtcaatagatattctaaaattactaaaacaagtgaagaataagtttgattaaaatttttttctatgacgtaaaaagtgttgatatagagacagtttttttacttgaatttaataaaaatatttttttgttaaattcatttaaatttagtattgcttttattaaaagaattctttataattaattctgttagttgccgttgtaggcacatggttatatgtgaaatgacaattttgccagaatgtcatatttatatatagcataaatttattttgcccgagtgatgaaattggtagacatgaacgactcaaaatcgtttggtttataccatgtcggttcgagtccgacctcgggtaccattgaaataatagccgatactgctgtattggcttttttttataaatatgtatataagtgcactatgttttatacaataacactagtcatctaattaattggccaattgaattggataacttctacatctttattattacatcatatgacagtgatttttgtcgttttttggtttaataggttattttttaaagttgtttggaaatgtgatttaaatatgatactattaggctaacagtgaaagagggataaataattatgaaagtattaaatgttggatcgttaaatattgaccatacatatcagttagaacgaattgttgccccaggagagacaattacatctaaacaaatgagcgtatatgctggtggaaaaggtttgaatcagtcaattgctatagctcgagcagggatagaggtatatcatgctggtaaaatcgggattgatggacagtttttgattgaactttgcaatgatagtggagtgaattctacttttattgaaactggcgtgatacctaccggtaatgctattattcaagtaacttcgcaaggacaaaatagtattattttgtatcctggagctaatcgaagtttagataaagcttggattgacaaagttctgactgaatttagtaaaggggatatattattactgcaaaatgaagtcaatttaatcgattatttaattattgaaggtaaaaagaaagggatgaatatttttttaaatccttcaccatacgatgagtatattgataaatgtgatttatcattagtcaatacttttttaatgaatgaagttgaaggtgcccaaattactggatgttatgaccccgagtgtattttaacaagaatgaaaaatctttatccacaggctaaagttgttttaactctgggacaagatggagtatattttcaagataaggagcagcgcgtgtatcaacccgcacgaacggtcaaagcggtagatacaactggagctggagatacttttacaggatattatatagctgctgtaattgaaggtaaaagtgcaattgaagcattgacttttgctactaatgccgctgcattagcagtcatgaaagctggcgctgcaaatgcaattccaaaacgtcacgatgttgaaaaatactaggatgatttgatggataggtaatgaagaaagtagtgaaataagatgaataatagtagaaccagagaagaattatttttatttagggatttggcaaaaacaaatatgactgaattcgaacaattgatttctatttcaattggagcagttggaaaaattgtttatgatccacagtttacagtaatatattgtagtgagggaatttctaaattgattggagttgattttattggcagtggtgaaagatatttttcgagcagtcagtttattcatgacgatgatcgtgaatatgtatatcaagaaatcggcaagtatgttaattctaaagagccatttagtttgaaatatcgtttaaaatgttcaaagggtaaagaagcttgggtgcaagctaaaggaatttttttagatgaattatatgaggataaagaccctataatgtatatggtttatactgatattacgccattagtagaagctaatgagcgcctagaacaagaaattcaacggtatcagatttttactgagtttgttcaagaatgcttttttgattatgaaattggatatgatagtttgatgttttatggaagtgatgttaatgataaaaatgatcaagaaaactggtataatatttggagaataaacaaacgattaattttagaacatttttaccaaaataagcatcatcttgataatgatctagaagttgatttaatcgataaaagtaaatgctggtgtcattttcgtgcgaaaggaatttataatacttatcacgatttagttagaatcgttggaacaatgaaaaatatccagtcggaaaaagagcgggaatcaagacgcaaagagtatgaagaaaaattaaaaaataaggcacattatgatcatatgacaggtttgctaaatcgttttgcatgtgaaacaattgttaatcaagtgttagatgaaggattggaaaatgtaacaggagtagtaattgatgttgataactttaaagaaataaatgatctacatggtcattatattggtgatcaagttttgattaaaataggtgaattatttcaaaaatattgtcgcagtgatgatattgctgcgcgtcttgggggtgatgaatttttcttgatgtttcttgggcttatgcagcaagatacgattcgagcaagattacaaacaatgcatcaagagattcataatattgctcgagagctaaaactaaaagtaccagtatctgttagtatgggggttactaaaatatattcaacggataaaacctttgatgatatttatgtccgagctgacgaaacaatgtatcaagcaaaattatcaggcaaaaatacattgatttgttttaatgaggaataataaaaccttaacagataaataaaattatcgttaaggtttttttcgaaacatcttttgttgcttggctagatcagactggctaactaatttctttatttcttgaacaaattcttgctgctgaatcggtgtgagacgatgataaatattgattaattcataattatgaatatatatttgagatttttcagcttcataacattcgtcaccgattgcgcttaaatagccagattgacttaatagatcaactaaactcatttcaaaagcgtgagctattttaacaagtgatggtaaagaaatattataagaaacgccacgatttcctaattcgatattactaatggaggatgctgataaaccggttattttttctaatttggattgcgaccagccttttgaaaggcgagtactttttatatatttaccaattaatgctatatcaatattttccataatacgcctccttttaacaagattataacgtacttaaactattgtgaccgccagaattatgtagacttatatggactataaaatagaaataaaaaaactttttattaaaaaagattgacattattcattctattgtatacaatgttttcaacaacatctgatataaatactgtgaaaagaaatagtaagtattcaaaatagtttagagagctcttggctggtgtaaaagagtctattagagaatattgaattcatcttggagtagaggactgaatcgttagtagtaggtctctccggcaacacccgttaacgtgtaagagtatgaactatttgattagcgtactcgatgaggttagtgtagcaatacattaataaattaaggtggtatcacgaagcataagctctcgtccttttataggaagagagttttttatttatatacagagttgaaataaaacaaaaggggatagaaaaatgattattgtaatgaaaatgacagcgacagaaaaagatgtcgaaaaagtatcaaaaatggttactgacaaggggttaaatgttagtgttgtaaatggaactggtcaatcagttatcggaattattggggatacaactcaaattgatcctaaagcaattgaagtagatgaagcagttgatcatgtaatgcgtgtatctgagccatataaacttgctaaccgggcttttcatcctgatgatacgatcgttgatgttgctggtgttaaagttgggggtgacaaccttgctttgattgctggtccatgttctgttgaaagtgaagaacaagtaatcgagattgctaaagctgccaaagctgccggtgctaatattttaagaggaggcgctttcaaaccaagaacttcaccgtatgcattccagggaatggggtcttctggtctggatattcttgttgcagctaaagaagcaactggattgccaatctgttcggaactgatggatgcccagtatttagaagaattcaatgagaaagtagatctaattcagatcggggcaagaaatatgcaaaacttcgacctgttaaagaaagtgggagcaggaacaaagaaaccaatcttattaaagagaggattaagtgcgacatttgaagaatggatcatgtcagcggaatatatcatggcaaacgggaatccgaatgtaattttatgtgaacgaggggtaagaacatttgagacatatacaagaaacacgttggatttacaggctataccggtagtaaagaaattaacacatttaccaatcataattgatccaagccatgcaggagggaaatggtggttagtggaaccaatggcaaaagcagcagtagcagcaggagcagatgggttaatgatcgaagtgcacaacaatccggagaaggcactgtgtgatggaccacagtcattaagaccggaaagatatgaagaattattaaaacaaatttctaaaatagctgaagttgttggaaagaaagtataattaattaggaggaaatataacgatggaaatgacagtttcattaaaagaaaatagctatccaatctatattgaaaaaggaatcttaaaccaagctgataaatatatcaaggagatatatcaaggtaataaaatcatgataatttcggatgatcaagtttatcattattatggtgatttattaacaaacgttctaaataaagaatacattgttgagcatgtaacggttcctcatggtgaacagtctaaacgttttgatattttaccatcgttatataaagctttattagattttaaattaacaagaacagatttaatcatcgctttaggcggcggtgttattggggatttagccgggtttgttgcagcgacctttttacgaggtgttaaattggtccaaatcccaacttcattattagcacaagttgattcttcagtagggggaaaagtagcagttgatctaccagaaggaaaaaacttagtgggggctttttatcatccgagaatggttttgattgatccaaatactttaaaaacattaccagagcgttttattaatgacgggatgggagaagtaatcaaatatggctgtattaaagataaaagtttgtttgataaactaaatagttatgataactttgaacagttatacatggatatcgatgaaataatttatcgttgcattggtattaagcgtgatgtagtcgaaagagatcagtttgacttcggggatcgtttattactgaactttgggcatacacttgcacatgcaattgaacaatattatcattatgagaaatattcacatggtgaagcagttgcaataggaatggtacaattaactaaaattgccgaagaaaatgatttatcaccagtggggactagtgatataataaaagaaatttgtattaaatataatttaccagtttatagcggattaaaaacaaccgacttactggaggcaataagtcttgacaagaaaaatattaataaaaaattatcgttagtattgttaaaggaaataggggatagctatgtctatcaaagtaatctttcattaattcaagcaaaggatagggtatagaatgacagcagtaaaaattacaccgactaaattaagtggtgtggtccaagtaccaccgtcaaaatcattagctcaccgagctattatatgtgctagtttagctaaaggaatcagtcgtatcgataatattgaatattctaaagatattcaagcaacaattaaagcaatgcaatcattgggaaccaaaatagagaaatatgatgactatttaatcattgatggcacaactacttatacaaagcaaaatagtgagattgattgtgaagaatctggatcgacgctaaggtttatggttccaattgcaattgttgaggaaaataaagctcattttgttggacgcggtaatttggggaaacgaccgctaaatactttttatgaaatatttgagcgtcaaaatattggttatctttataaagaggatatccttgatctatatgtaattggtaagttaaaacccgatcattataaggttcctgggaatatttcttcacagtttatcactggactgctatttgcattacctctattagatggtgattcgattattgagatcacttcaccgttggaatcaaaaggatatattgatctaactttgcagatgttaaatcaatatggaattaaaattgtcaataatgattataaaagttttattgtaatggggaaacaagaataccaggctcatgactatcgagttgaggcagatttttctcaggcggctttttatctagttgctggagcgattgggaatgatgttgtattaacagatttgaatcttgattcgttacagggagataaagcaactttagaatttcttgaagccatgggggctaaaatttctgtagttagtgatggtatcaaggttacgggtgaaaacttagcagcaacaattgttgacgctagtcaatgccctgatgttatacctgtggtttcagtagctttagctttagctcaaggtaaaagtgatgttattaatgctaaaagattgagaattaaagaatgtgatcgaatcatagcaactcgttcacagcttaatgaattaggtggaaccgtcacagagttacctgatggaatgacgattcgcggtgttaatgagtttactggcggtaattgttctagttttgcggaccatcgaattgcaatgatgttagcaattgctgctactcgcagcagtcagcctgttgttattgataatatggaatgtgtagaaaaatcttatccaagtttttgggaagattaccagtcattaggaggaattattgatgtcatcgacgtggaaaaataatattgagataacaatttttggagaatctcatggaaaagcaattgggattgttttaggaaatctaccaagcggaatcaagattgatttagaggaagtagccaaagaaatgaaacgtcgtgctcctggacaggataaaatgtcaactgctcgaaaagaagctgacaaggtagaaataatgagtgggttacaggatgatgtaacgactggtgcaccattatgtggaataatttataatagtgatcagcattctaaagattattcattattaaaagaaaaaatgcgtcctggtcatagtgattatccagcttttattaaatatagaggatttaatgatgtacgtggcggtggtcatttttcaggaagaatcactgctccggttgtttttgctggggctatagcaaaacaaattttggcaaagcaggggattcaaattggagcacatattctaagtattaaaaacgagtatgatgaaaattttgatatgcgtttatcaactaagacacttgaatatttacgcagacaacattatcctgtcattaatcaagaaaaatatgaaaagtttgttaatattgttgatgctgcacgaatggatcaagactcagtaggtggcaaggttgaatgtgcgattattggtttaaaacctggtcttggtgaaccgttttttgattcaattgagagtcatttatcaagtttgttattttcaattccagcagttaaatcagtagcttttggaaatgataagattagtgaattatttggtagtgaagctaatgactgttactattatcaagatgctctagtaaaaactactagtaataacaatggtgggattactggtggaatttctaatggaatgccagtcgtttttacagttggaatcaaaccgacaccttctatttctaaagaacaaaaaacgattgatgtaaaaaaacatgaaaatacaacattaggagttcatggacgtcatgatccttgcattgtttttagagcaactgtagttgtcgaagctatggcagcattagcaatgttggatttggtgaggtaatttatgaaagatttagaacaatgtcgtcgtgaaatcgatgaaatcgaccaacaattgattaaattatttgagcagcgaatgaatgttagtaaagatgttgtcacttacaaattagctcatggattagaaatttttcaaccagaacgtgaaaaagcagtaattgaaaaaaatgctgcacgtatgctgaatccagagcttgctgattatgcacgtaattttatgcaagatgttatggatgtcgggaagagctatcaagctacttttattcctctaaataatctttataatttagctgcgccaaaacgagaaaatattaaagttggatatgcaggggtgcctggggcttttgctcatcaggcgatgttagaatactttggaaatgtagaaaatactaactatgttaattttcgtgatgtttttgaggctttaaaaaatgcggaaattgattatgggattgttcctctagaaaattcttcaactggagcaattaatgataattatgatttagttcgggattacgatttctatattgttggtgagcacagtgtctgtatttcacaacatttattagggattaagggggctaaaattgaaaatatcaaaacagtctatagtcatccccaaggaattcagcagtcagctgattttttaagaaataatcctcaaatgttgtctcaagacttttcgaatacagctgcagcagcaaagtatgtaagtgaatgtaatgatttatctaaaggagcgattgcttcaaaagtggctgcaaaactgtatgatttagaagtattacaggaaaacattcataatgaaaaaactaataatactagatttattatttttgctaaacatcttgaagatcatcctcaaactgatcgggtgagtattgtatttacattacagcataaagttggggctttatatggggtgttaaaagcaattaaagatcaccaaataaatttatcaagaattgagtcgcgtcctataaaggataaacgttggcaatattatttttatattgattttgaaggtagtcttcatgatgataatgtcaaattggcattagaacaaatgaaaacaaattgtcttaccttaagagtcttaggcaattaccatcatgcatagggagaaaagatgaaaaatattgtattaattggcattatgggatgtggtaaaactactttatctagaatgcttggtgaaaaattaaacagaccagttattgacattgacgaatatattgttgaaaaatatcatcaaacaattccagagatgtttgaagttagtgaaacatattttaggaataatgaaactgctggatgtaaagatgtttccgacttaaatgggcatattatttcaactggtggaggggttgttttaagacctgaaaatattaaatatttaaagcaaaatggaataatcatttatattgatcgacctattgataatattttaacggatgttcaagttacaagtcgtcctttgttaaaagagggcccacagaaactatatgaattagataaacaacggcatcagctttatcttgaagcttgtgatcatcgtattgttaatgatgatactttagaaaatattactgataaaattattgagttaataactaaaaataagtttgaggattaatcctcaaacttatttttttctttatttagttttttatttgtatacattttagcatctgcgcgtttgaatgtatcctttaaatcatgatcaattttaggatcataaacagcaaaaccaatagagattgataatttttcatcagtttgttttgaaagctctgtttgaattgctgttacaacagctttgatttgctgtttggcatcatgatgaataagaatgataaattcatccccgccaaaacgataaactgtatttttttggacatgtttttcaagaattttagcaacttttttaatatattcatcaccagtacgatgtccatatgtatcattgattttttttagatcattaagatcggtaataattattccggtattgtgcttatgtgttgataagttttcaaaatctatttcaaaagcattccgattatgtaaatttgttaagtaatcagtattagccatatctttaaaacgaggatttgaaattcttctaaatgatagaacggcaatgatagtagcgataagactagccataatggcaatcaacggtgtaataattcgaatttgtttaaaggcttcaaattgatgactagcatcaaattcaattcctagcacgccaactacttttccttcgtcgtgtatagggtaatatgaaacaaaaatgggaccccaggtagtttccttaatctgatctggcaaaataattttattttttaatgctgctttaagctcaggaattatttctttttcaattttatctccaggataacgaaaatctggacttgcagttggcagtccatcgacaagatagatatattcgccttcatctgtcatttttgcagtatagagatataaaacatttgttgcattttttacatcttctaatttttgttttatttgtttataagtatcatttttcatatcaagagaaaaattatgattaaaagtatctttgtctaaataattttctacataatgatatatcgtgtttgaacgttcttttagactatagatcatatcatcgtgagtgattttataattaaaaatatagacacaaaaaaaggatgcacaaacaattatgattgtaatgatcgatacttgataatctacccgatcgagccgtttaaatttcattggtttcaacccctttctttgattctaccataaattgactaaattgtgtttagatatgctgattataaaaccaaatattgtcagtcaaagtaataatattcatcctcatcaaaatggtatttatgatataatgtgttaaggtgatagagatgcagttagaaaaacaaatatatattgataaagatttaccagctggctggaaaccatattatatttttttaatgaaagtaaacaatgaaattgtggggcgaatgactttacgagaaggtagttgtgaagaacgatactatgatggacatattggttatactgttgagcccgaatttcgtgggcattattatgcgtatcaaggagtccagttaataaaaccaatagccttaaaactagggtttaaggaactgataattacttgttcaccaaataatttagcttctaaaaaaacgattttaaaattacaagcacaatatttagaaacagtagaaatacctaaaaaatatcggaaagattttgaagccggtgaaacaattaaagaggtttatttaattaaattataaggaggaaaataatgagatttgttcatattagtgatattcatttaggaaagttgttatatcaacaaaatttattagaaattcaagctgatttactgaatcaagtttgtgattatttagtcgataacgaaatagacgttttagtcatggctggagatatttatgatcggagtgttcctagtaatgaagctattgatgttttaaatgattttttaacaaaagctattttaaagtatcacaaaaaagttttgatgatagcgggaaaccatgatagtgcgagtcgattaagttttgttagcggattgctaagacaagaaggattgtatattgaagcatatccggctaaacaaatgaagccgatagaaattgaaggggttaatttttatttaatgcctttttttaaaccatcttatattcgctatttgtatgaagatgaacaaattgttacatatcaggatgcttttcgatgttatcttgaacatcaaaaaatagattttactaaaccgaatgttttaattacccatcaatttattgctggaaatagtgaagttatgcgaagtgaaagtgaagcagtattaagtgtaggtggaacggaaattattgatgtttcattagttaaacaatttgattatgtagctttgggacatatccacgcacctcaaaaaatatcaactgaaactattcgctatagtggcagtttaatgcgttattcttttgacgaagttaatcaaactaaaagtatagttgaggtaacgattgataataaaaaagtatcctatcagcttgtatcattacaacctaaacaagacttaattaaaatcactgggagttttgatgaaatcatggcagattcgtttgccgttaataataatgattttattgcagttgaattaacagattcaatgttagtgcctaatgcgattgattatttaagaacaaaattttcaaatgtattgcagattacttatccaaaactaataagtaatgaaacgagtaataatactaaagctgatcctggatttgaaaaacttgattcagttgctttatttgaacaattttatcaaaaaataaaaggtacagaactaagtgctgaagccaaacagattgttacagaaatcatgatgggagggaaagaaaatgttgcctaatcgtcttactatgtcagcatttgggccgtatcatcaagtagtgacaattgattttgagccatttattcaagatggtttatttttgattactggtcctactggagctggaaaaacaatgatttttgatgctattatgtttgctttgtatggagtatcaagtgggagtgaacgtagtagtgaacaatttcgaagtgaccaagctaatcatgatactcctacttttgttgaacttgattttattttacataatcagcattatttaattaagcggtcaccacgatatttattagagggtaaaaaaacacctaagttacccactgcattattaacattgccgggtggtaaaatgatagaaggaatcaaagaagttaattataaaattaaagaaatcctgggaatcgatgataagcaatttaaacaaattgctatgattgcccaaggtgaatttacaaaacttatttatgcagggagtgaagagcgagaaaaagtattacgcaatttatttaagacagataattttagatgcttagaagaacagctcaaattgcgagttaaagaatataagagtaaatatgatttactttttaaacaaagagagatgttgttaaagagtcttgatgtagaagatgagaaaattgatttagatgaatatttggattcactagaaaaaaagataaagattaaagcgatggagtaccagcaaaatgcacaatattatgagcaaaaggcaaaagagctaaatgtcattgagataaataatcgtcgcttagaatatctagatgatttaaaaatccagctatcgaattatttaagcaaagaggattattatcgagaattagagaagatgatcaaagatttaaaaagagccaatcaacttcaaaatatctattcactaatgattagtagtaaaactaaattagctaagctaagagaaaaagaaaaactcttaaatgaacgcttatcatttgcaaaaaatgatttaaaaaagcaggagaaacagtatgctttagtctctaaatatcacgatgaagttgctcagggacaaattgaattagaaaaaatggtagaactaaaacaaaatgttttagtatatcaaaaagatttaaatcagggaaataacttaaggaaacagattaaagtaattgagagtaaaaatatcggtttaaatgatagattacaaaaaagtgctaaaattatcgaacgagatagtaatagtattgctcatttagataaacttaagggtgattatgagttgataaatcaaaattatcaaaaaattcatgctcataaacttgagattcataacttaagctctgattatgataaatttttaagagaagaggaacattgttatgagcttcgtgaacagtatcaaaaaattgaagaaaaatatttgaatgaaaaaaataaatatgatcaaatggaacatcattttagatcaagccaggctggtattttagcaagcagtttaaaggaaaatgaaccgtgtcctgtttgtggttctttaaaccatccacaattggcagattttgatcaaaaaatagtttatcaagaagatttaaaaaaagcaaaaaagaattttgataagtgtagcgaaacacgaaatgatatttataatgctttaatattaaaacagcaagaagttactttattaaagaaacaaatggaaaatgattgtcagcgcttaggaattgaagaagaattggggaaagaagtttttattaaagtattaggaaagatcaatatcgatgaaaataaattattaaaacaggctaaagaattggataatgaaattatttatttaaataacttaaaaataagtttagctaatcatcagaaggatctagatttattagaacagaatattcaaaaaaataatgcacaagtacaagcttataaagatcaattaaatcaagtcattggacgaatggaacaaaataaacaattaaaagatttaacgcatcatcaggttgatcagcaaattgaagaaaagcaaaaagaattgttaggtttgactaaaataattaaagatattgaagaaaaataccgttctataaatgaacagattattcaattggaagctcaaaataggtcgtattgccagcaaatcaaagatgaggaaaataattatcagcaagtactaagagaatatcgtgggaaactgaatagtttatttacagatgaaaaggaatttttagagattattaaaaacgtcagtcagcttgaaaataaagaaaaggagtatcaggcttatttaattgccaaggattctttgaataaacaaattcatgaattgcaacttgaattaaagggaattgaagttatagatgttgaagtcgtaaaagaaaaactaattattttaaaacaaaaattagattctgctttaaatattttaaataatttaaatgcccaattaatgacagtaaccagtacaatcaagaatattaaaaatattgatcaggaattaagtaatagccatgatatttatcaatgttatttagatttaagtgaggttacatctggaaaaaacagctatcgaatttcatttgaacgttatgttttagcggcatattttgaaaatattctagtttatgctaataccctgctaaaacgtatgtcgcaaggacgttatcagctttatcgtcgtgataaccgctctaaaggggcaggaaagcaaggactggaattagatgttcttgatttagaaagtggacttttacgtgatgttaaaacattgtcgggtggagagtcttttaaagcggcattatctttagctttagggctttctaaaatgattcaaggttatgctggagggatagaattaaatactttatttattgatgagggctttggttctttggatagtcaatcattagatcaagcaattgactgtttgattgatattcaacaagatggtaaattaattggaatcatttcacatgttagtgaattgaaagagcgaattgatcataaaattattctttcacggaagaacaaagaaacaaagattgctattgaataatcactttattaatagtaaaatagggaaagattataatgaaatgaggagaaataatggcaaataataagaaaaatgatgcaataacggcgatggaagacgattttgctcagtggtatactgatgtctgtcgtaaagcagaattaatggattacagcagcgtaaaaggatttattatctatcgaccatatagttatgcgatgtgggaagcaatccaacaatacatggataaacgttttaaagaaacaggacatgagaatgtttatatgccgatgcttattccacaatcattattacaaaaagaatctgatcacgttgaaggatttgcaccagaatgcgcaatagtaacgaaaggtgggttagatgatctagaagaaaatttgatcattcgtcctacttcagaaacacttttttgtgagcattatgctaaaatagttaattcatatcgtgatttaccaaaattatataatcaatggtgttcggtagtacgttgggaaaaaacgacaagaccatttttaagaggatctgaatttttatggcaagaaggtcatactgttcatgcgagtgaaacagaagctcgggctgaaacattgcaaatgttagaaatctatgaagatactgctaaaaacttattagcaatcccaatgctaacgggacggaaaactgaacgtgaaaaatttgcaggagctgaagaaacttatacgattgaagcactaatgcatgatggtaaagctttacagtcaggcactagtcattattttggacaaggttttgctaaagcgtttgatatgaaatttttatcaaaagaaaataaattagaatatgtttatcaaacatcttggggagtttcaacaagattgttaggagcaattatcatggttcatggtgataataatggtttagttttaccgccacgggtggcaccgactcaagtaatgattattccaattcaacaacaaaaagcaggggttttagataaagcttatgaaattgaaaaacagctaaaagaagctggaataagagttaaagttgatgcaagtgataaatcaccaggatggaagttctcggaagcagagatgcgtggcgtaccattaagattagaaattggtcctaaggatatagaaaataatgcttgtgtaattgcaaaacgtaatgatggaactaaagagaagtatgcattagatcaagaactaattaatacaattaaaacccttttagacacaattcatgatgaaatgtatcaaaaagcattaaatcatcgcaattcaaatattcgtcaagttaacacatatgatgaatttaaaactacattggaaactgaaggcggttatatcaaaatgatgtggtgcggtgatgaggcttgtgaagttaaaatcaaagaagaaactggagcaaccagccgatgtattaaagaagaggaagaagcatttggtgatgtttgtcctatttgtggtaaaccagctaaaaaggttgtgtattttgcaaaagcatattaagatacgaaaatttcgtatcttttttgttgttagttgacatatcaactaatgttggtataatagttgacatatcaactaatggaggtgcaaaatggaaagaattggacggattattcatcatttagcaatattaaatcgaaatgatagtaatcaaagattaaaagagtatggattaacaagtaatgaaggttctgtcctaatgtttttgagtcgtcatagtaaggtttatcaagaagaattgattaaagagttacaaattgataaaagtgctgtaacaagattgctccaaaatatggaaaataaagggttaatcaaacgaattcaatcgcctgttgataaacgtttttatttattggagatgacagccttaggtcaagaaaaacagcagatagttgaccagacatttgctaaaaaagattttattttagtatctgggttgagtgaaaaagaacaagaagaacttcgaagaatgttagatgtgatacaaacaaatctaaaaggaggtaaaataaatgaatgatgagagaatgggaaataaaaaaatccttccattattaatagaatttagtgttccagcaattattgggatgctagttaatgcaatttataatgtggttgatcgaatgtttattggaaatgcgccacaattaggagcggtagggattgctggaattacaataagttatccagttacattagtattaatggcaatttcattaatggtaggagtaggtggagctactcgtttcagcatttctttaggacaaaaagagaaagataaggcttcaatctatcagggtaatgcaattgttttaacagttgtttttgggctgatgtttactgtattagggaatatttttataacacccatgttagaagttttaggtgctagtaaaacagttttgccatatgccagcgattacttatcaattgttttgtatggagcagtatttcagtgtgttgcaatgtgtgggaataatttttctcgggcacaaggcaaccctaagaatgcaatgatttcacaattaataggggccggatttaatatcgtttttgattatattttaatcattcagttgcatatgggaatgagtggtgcagctatagcgacaattggtggacaattcttaagtatgatttggcaactgtgctatctatgttcaaatcgctctttgattaagttagatatcgaacatatgaaactaaagctgatctatgcgttagatattattaaaacgggaataccagcatttttaatgcaaatggctaatagtgttttaaactttattttgaatagtacattaggaatgtatggtggtgatatcgcaatttcaacagtaggaatcattactagtttccaaactatatgccagatgcctttaacaggtttaatgcaagggcaacaaccattgattagttataattttggggcaggcaattatcatcgagttaaagaaactttaaaatatgcgattatcggtggtacaatgattgcagttgtaggttttttagcagtacaatttttcccggaaactataattagaatgtttaatggtgaggcagaagttgtaaaactaggcacaaaggcaattcgaatttggttcttatttttaccattgttaggggctcaaatcatgactgctaattatttccaatgtattggtaaaattaaagtagcaagtattttaaatttacttcgtcaagtaattattttgattccaatgattttattgttagcgactttctttggtttgaatggtattttctgggctgttccaattgctgatttaggagcgtttgtaattacaattttctgttttataaaagcaatcaaaaagctaaagtaaaaagatttctactctatagaataagacatgaaataaaaaatggattattcatagagtaatttattttttattaaaaaataataactttattagcattatttcctaaaatcgacattaaattctcatcagataaaaaagccatggatagaaatccatgacttacatgcctgattattttaacattttaattgaagtaattacaggctggttagaagcttcaacagttccattattatcagttactggaacagttgtagcaattttgtcaactacctcgattccttcataaacataaccaaaaacagcataatccccatctagtgaagtagttgtttgatgcataataaaaaattgtgaacttgcactatcaggatcagatgaacgcgccattgagattgcaccgcgagtatgttttaaaggattttcaacaccgttagaactaaattcacctttgattgtttcatcagaaccaccagttccattcccttttgggtcacccccttgaatcataaagccgtcaatgatccgatggaaggtcaacccatcatagaaaccttctttaactagttttacaaaattagttacagtaataggtgcttcatcagcttgaagttcaactttgattactccataatccttaacatcgatttcgattcgataattaccgcttaataaatctttggatgctgttttcttatcttgttcatcattactttttccaccacatccggctaagcttaatgctaatagcataaccattgtaaatttaaataatttcttcatattatctccttatatctatctattatttattatacaaaatagtgggtgggattgtccatataaaaataatcaaaactgtcatggttaaaaaatataaaaatgtgataaaatgaatgacaatgataaggggataaaatgagatgaaaagaattgctttaataaatgatgtaacaggatatagtagatgttcgattgcagcgcagctgccgataatttcagcaatgggaattgaatgtgtttttgttccaactgcaatcctatcagtaaacacaatgcatccagaatattatttcgatgattatacggatcgaatgaatgattatattgaaacatataaaaaaatgaaggttagttttgatggaattgctacaggatttcttggttcagaaagacaaatcgatattgtcattgattttataaaaacttttaagaaaaaacatacatttgtattagtagatccggtaatgggtgatcatgggaaactttatccgacttacactactgcaatgcaagataaaatgcgtcaactaataccatatgcgacaattatgacacccaatttaactgaattatgcgcacttttagaggtaccatatccgcatgatataattaatcgggatgagctgattgaaatgtgtcgccaattgtcaaatttgggcccacaaatggtcgttgtaacagggattagtattggtgacgaaattattaactttgcatatgaacaagggaaggaacctgccattatcaaagtaaagcgaataggcgatgatcgaagcgggactggtgatgttatcagcggtgttattgcgggaagttatttaaatggtttgaatttctatcaatgtgttgaaaaagctgcaaattttgcatctaggtgtattgagtatagtcaagcagttggagctcataatcatttgggactatgctttgagcctttcttaaaagaactttaggaggaaagaaaatggtgattttatatacgctacatggtaatggatatattgatttaaaagatctagatacgtataagggaataacttgttatgttaacagcacaaacagatgtagttgtgcatgtactttttgtttacgtaatacaaaagaaatgcttgaatcaaattctctatggttaaaaagggagccgactgtagagatgattattgcggaatttgaaaaatatgatttaacagcatttaaagaagtagtattttgtggttttggtgaaccgttaactcgccacgatgatttaatgaaagttgcaaaatatattaaagagaaaaggtcagatttatcgattagaatcaatacaaatggcttatcatcaattacgttagggcgtgatattgcgcctgattttaagggagtaatcgatacagtatctataagtttaaatgctccaactaaggaagaatattatgaattaacaagagcctgttatggagttgattcatttaactacatgctccaattcacaaaagcgtgtaaaaaatatgtaccaagtgttgttttgacagttgtagatataatcggggtggaaaaaattaaattgtgtcaaaaaattgccgatggtcttggagtagagttaagagttcggccgtttgaagaataataaattgtatcaagattataattatgatagaatttataacagtgaggtaattataaaatgatgcaattaagtcgtgaagaaagaatgttagatgtaaaaagtatgactaatgttcgtgatttgggtggctatgaaactcaaactggtttttatacaaaaagtcataaatttattcgttcaaccaatccaagtaagttatcagatgatgagaaagaatatctttatgattatggaattagaatgcaagtagatttacgaagtgactttgaagtcgaacagttaccaagtcaattaacgggttatcgtgatattgaatactataatgtcaatttaatgcagtctaaagatttaaatgttctccctagtgaagtaacaaattatcaagatttagctggtttttatatttttatgctagaggcaaataaacagcagtttaaagaagtttttgaattgttttatgatcatccatacggtgcaattatgtttaattgttcagctggaaaagatcgtactggggtgattgcggcattattgttagatttagcaggttgtcatgattatgatattgttaaagattattcagaatcatatgaaaataatcttaaaataatttctgaattggaacgtttggttgatgatgctaatcgcgcatttttagaatctgctccacaaatgatgatgaaatttttggactatttgagagaacattatggaagtgctaaagagtatttggtaagttgcggtcttgaagaagaaaagattattgaaattatagaaaattttgtaatttaaaaaaagtaattctcctatttgagttgtatatgataataggaggatttttttatgagaaaaacaaataaactgacatttaaacaaaaacaagaagcagtagcggagctatttaagcagtttcaccgagctaaattgaaattgtattgtttagaaaatactaatttctatccgcagttaaatatcgggatgcttcatgaaaagaaaagtggatataatgcttcaattgctgaacgcttaaatcaacgaattgatgatagagatgaattggagcgagtggtggcagcatttgaaattgtgattcaagcattaagtcctgagagtcaattaattattacaaatgaatttgttttacagaagaatcatgagtggtggcttgaattttatagtcgagcaacttattatcgtttaaaaacaagagccttggaagaaatattattttatgtaaatatttcataattgtcatatattagcgctttttccttgaaaagactggtattttagatataataaaaaggtatttttaaaaaggagaaagacaatgcttgaaaagatttttaaattaaaagaaaagggaacaacggtcaaaacagaggttattgctggaattactacgtttttagcaatggcttatattttagctgttaacccgaacatgttaagtgagactgggctgtcttatgatggcgttttcttagcaacggcactatcttcagggatcgcaactttgatcatggggttattagccaactatccagttgctttagcaccggggatgggagttaatgcattatttacatatacccttgttttttcaatggggtatagtcctgcagcagcattggcagcggttgtagtatcaggaataattttcttgttaatttcagttactggggtgcgtaaagcaattattaatgcaattcctcaacaattaaagcttgcgattggagctggaattggattttttatcgcctttattggactaaaaaatgctggaatcattattggaagcgaatcaacatttgtggcgttagggaagttgactgatccagttgtattattagcagtatttggggtcttaataacaattatcttaatggctcgtaagacaccagcagcagtattttatggattggtgattaccgcaattgttggaattgtagctggtttatgtggtatcgagggaatgccggcaatgccttcaaaaattgtttcaattgatttagatactagtgggtttggtatatttatgaatggttttggtgagttatttagccatccggattgtattgtagcattattttcattgttatttgttgatttttttgatactgcaggaacattaatttcagttgcgaacaaaactaatttagttgatgaaaatggtgagttagataatattgaacaagcattagttgctgattctacaggaacagttattggaggaattctaggaacctctactgttacttcttttgttgaatcaacagctggggttgaagctggaggaagaacaggattaactgcttgtactacagcaatattattcttcttatcaattttatttgctccagtacttagtgttgtaactagtgcggttactgctcctgctttagtggcagttggaatttccatggcaactcaattaggtggaattgattgggatgatatcgttttcgctgcatctggtttcatcacagtgatcatgatgattttaacttattcaatttcagatgggattgcatttggttttattgtttatggtattactagtgtaattgctggtagatctaaagaaatcaaaccgattgtttgggctttaattttaatcttcgtagtatattttgctttaatatagtgaaaagatacttgtgaactattttaagtaatagtttatcaagtatcttttattatttaataaatatgatttaatttaaagttttattaataatatatgtgggttagccccttgctgactaagattatttttcaatactttctagttttgaattgattcaatcagctcggtaataaagcaatttgagtgacaaggtcaatcgttgcaattaaacctgtgcttcgttagtataaaaatgtaatcaactattttgattttttactatctaagtaatcttgtttattaatttaccaaaagtagtaacatttataattactatatttcttattttattaatcatttgatattagagaataatattattttttcctaatagctattcaattatatcaagtgttcaatttgacaaagcaaagtaattgtcaatggaaacttactttaaaaaaataaacttagtttctcggcaactatttctaatataatattcaagactttaattatttacaaaaatccaaaaatttaaatataaggcaaaaagtatccaacccatgtaaggaagtaataaaaaagctgctaaaggacggatttgataaaataatttgataagaatagcaactagaatacatagtgtaatcaatattgctagtgctaataaaaaactttggtaattaaaaaaagcgataggccatgcaaaattaatcagtagttgaaaataataaataataagagcagtttctttatttttactattacttcgatgaattagataacttgctaaaccgattaaaatataaagaaatgtccaaacgattgggaatagatatccaggcggagagcacttaggaaggttaactgtttggtatacatccattgcattcattgtaaaaattgcacttaaagcaccgattcccagagagattgatagatttaatataatatatttgtattttttcaattttatcacctatattagtatagacagattatcgaaaaatattaaaaatcttaagaagtgataaagaatgataaatttttttctaatatagaaaaaaacacttctatagaaaagcgctttcatgtataataatagagtgaggtaagagaatgaaattagtatcatggaatgttaatggaattagagcctgtattacaaaagggttctatgatgttttaaaagaaagtaaagcagatattttttgtgtccaagaaacaaagatgcaagaaggtcaaattgaattagaaaagcatggatattatacttatatgaatagtgctgaaaaaaagggttatagtggaactttagtgttttctaaagaaaaaccattaaattatagttatggaattggtatcgaagaacatgaccatgaaggccgcgttgttacgcttgagtatgaaaaattttatttagtcaattgttatactcctaatagccaaaatgaattgaaacgattggactatcggatgcattgggaagatgattttcttgcatacttgaagtctttggagaagagtaaaccggttattttatgtggtgatttaaatgtagcccatcaagaaattgatttaaagaatcctaaaacgaatcgtaaaaatgcaggtttttctgatgaagagagagctaagatgacaaatttattagaaaatggttttatagatacgtatcgatatttatatcctgatcaagaaggtgtttattcttggtggtcatatcgatttaatgcccgtaagaataatgctggatggcggattgattattttattgtttcagattgtttaaaagaagggataaaagaagcgtttatttgtactgatattttgggcagtgatcattgccccgttggattagaaatagatttataagatatgttaaaggagattgtgtcaatggcaccagttacattattatcatttcttactcttttaggaataaccgtatttttctttgcatgtgtagcgtacaataaaataaaaaacaagtaatgatttatttcattacttgtttttttaaattgaaataatccccattgttgataagactgaactaattaatattattaataggccagggacaacaacatatttcatacaaaatagataagcttttttacgcttgaatttagaactgtattcaacttcgtcagtaactgttttaaaaccggttactttgatgataagtagacatgtacaagctgcagaaattggcatcatgattgagtttgtcataaaatcaaagaaatcaagaatacttaaaccaagcggtgtaatgaaatctaaaacaccaaatccaagtgaacatggaatacctaataaagcaattcctccaaaaataagaacacagcatttttttcttgaaaaatcatatcgatcttgaataattgaaacacaacattccattaatgaaattgctgaagttaatgctgcaaacagtactaataaaaagaatactaatccaataatgttaccaaatgacatactggcaaatacttttggcattgtaataaacattaaggaaggaccggcgtttagtgtatctggatttccaccagaaaaagcaaatactgcggggataatcattaaacctgctagaaaggcaattaatgtatccattatctctacttgagtaattgattgttccatatcaatttcacgtttcatatatgaaccatatgtaaataaaattcccatcccgatagacaacgaatagaacatttgtcccatagccgctactactgtcatgattgaaaaacgcgagaagtcaggaattaaatagtatttaaccccttcaatagcaccaggtgtaaataatgcatataaagcaatgaatagagccattgcaactaaagcaggcattaatactttactgcatttttcaattcctttttcaacacctagcataactacgccaaataccattccagcaaagacaagtaaccagatgacaggctgtagtgttgaagatgaaaaaccagtaaaataggtatcactaactaagctggcagaattgtttgtaataaattcaaataaatatttacaaacccatcccccaacaacacagtagtaaggtacgatgagcattggcacgatggcatttagccaaccaccaaattgaagtttttttgcacccaattgtttataggctgcaatcgggctcttttttgtttttcttcccaaggcagtttcactaattagcaaagcaaaaccaaaggtaatcgctaaaataaaatatgtgaataaaaaagtacctccaccatatttagctgctaaataagggaaacgccaaatattcccgagcccgacagcagaaccagctactgccataacatagcccaggcgaccagaaaagctacttcgcttgtgttttgtttccatttttatctcctattattaaattttcatgccttttcattataataaaatttgtctataaaagtcaattaaatggcactaaataggatgtttttgttatgattttgttaatgctgagttaaattagatcaatagtgttatgatataaatataaataagtaaagaagggataaaatatggcacgaataattgcaattattatggccttatttggtcataaagggcattcgtaatttcggtattaaaaaagatatctacgtttagatatcttttttatatattgtaataccatctttaattgtctcaatgatcttaatctgacgaatttcctcgattgcaactttgcaaggattacgatcaaggattaaaagatcagctttttttccttctttaatagaccctttcaagtgttcttcaaaatattgataagcggcattaattgttactccttttaatgcattgtagacagatatttgttcatctgtccccaaagtaaccccgtttttggtttggcgttttacagcacaccaaatcgtttctaacatgtttggctcaataacaggggtatcttgatggaaggtataaggtaaatctaattttaaagcactatgaacacaagaaatagattcagcacgttgtccaagattacggcggtgaatatcaccccaataatagatatgagcaatgaagaaactaggaatcattccaatgctttttagccgcggtagttgatctggtcttaaggtttgactatgaatcattacagggcgtagaggtgtgtactgatcattaaaggcatcaagtagttgattggaagcagcatcaccgttacaatgagttagtagttgcgctttatcattaatagccatatctacgaattttttaacatctgaatctaagtagatcggatatccacaatagtcaccactattttcatatggcttagataaccaggcggtttttccttgtggagaaccatctagaaataacttataaccgcctagtttaaaatgatttaagtaatgatgatattgttgattatcccaatataaagaataattatttttaatatcaacataacctacaacatcgagaaataatttattttctgtcgccaaagagttcaataaatcaaattcatgctgtttcatatatccctcttgcacagttgtgattccatagctagcatagatttttaaggcatcaaggatttgtgtttttaaatttttattttccttgcttccttggcttgcaatcgtaataaaagcttgttcctcaagataaccatttaaatgaccatcctcatcacgtccgtatttaccaccgacaggatcgttaatttgatcagttagtcctagtagctgcattgttttagtattgactacacccatatgacctgatgcatgagccatcataattggattagtggtagaaattttatctaaatcacttgcagtaggatggcattgttctttgagaaaattatgatcatagccaaaacctattaacatttcttctgaagtaggattattttcttcaatataatttttaaaacattgaataatttgagcaatacttgttgctttacttaaatcaacaagtttaagtgtacttgctaaagaaacaacatgactatgactatcaataaaagagggcattaaacattttccttgtaaatcaatgaactcagtatcagcacagactagattttttatttcagaataattaccacattttttaatcacaccatcttctacataaatagcttcataatcactattttccatcgttagaatatcaccattataatatatttttttcatataaacctcctattaatattatagccattgcaaatgaaattaatattaagttaaacaaaaaatcagtttaaaactgattttataaatcttgactttctattaaaacacaattttgataataattaagattattttcattaatcaaagaaatcaaatcatcattataagtacctggctgtaaccagatatgtttgatattaagctggttacattctttaatataatctattccaaattttggactaacaacaaacacagcaacgtcaattttatttttaatggcagttagattgggaaaagttgactttccatcaatttctttataaataggtgaaactccatacacagttttttctatttcatttaaacgttgataaatcttgtagccaaatttatcaggatttgtcgttacaccgattactgcaaaattttgataatgagttaagatatctttagcattcataatttcagctcctttattttgataaatatattatatcatgataatggcaagatatagtgatagatgcttctttacttataaaagaagctaattttataatactaaaaagattatttttagatgttatactcactaatttatattgatagacatactactatttattattatatagcagtacttagcattactgaatacatggacttataagtagggaggagtagttgacttgaaggatataacagagatgttaaaaggaatattagaaggctgtgttttagaaataattaatcaagaagaaacatatggatatgagattacaagacgactcaatcagttaggatttacagaggttgtggaaggaacagtttatactatattagttaggcttgaaaagagtggattagttaagattcaaaaaaagttgtctaaaatgggacctccaagaaaattttattctttaaatgaaagtggacgtgaaaaattacgactcttttggacaaaatgggaatttatgactgataaacttaatgaattaaaggagagtggtaaaaatgaataaattttttgatgattattttaatattaaaataatgataaaaagtaaaaaggaatatcgaacgcatatgaaaagggtagagcaattaccggctgattagcagtgtgttttaaaaaaaattcaagcatatatgtggcagtttgtatccgggtcaggatatgatatgcttgaaattcaatagggttacttgaattatttgaagaagggcagcagtacgaagatcagttttagaaataactggagatgatgttgctgattttgtagaagagcttttaaaaaatacaagaacttatccaacagattggaaaagtgaatttaatcacgaaattcaaaaaagcttaaaataaaagcttctaaacaataaacttttataatataaagtaattgatttgataagttaattgtttttattagatactttataaagtaaaaagatgttatatctctttattgtgatataacatctttatttaataattgtttatataaggtgagatcttctttaaaagtattgattgatgcttgccagaatgacttatcttttaaattaatattaacacttgaacaaacatcttctaatgacattttccctgttaaggataataatttttcataagtattgctaaattttgaaccttctttttggtaaatagtgtataatcctttagctaaaagaagaccgaaagcataaggaaaattataaaaagaacaatctgcataataatagtgtggtttccaggtccacatatatggatgaagatattgatgatctaaaccatctccataagcatctttttgagcctgaatcattagttctttgatctcttctactgacaaagcaccagtttctcttttttcaaaaaaacgactttcaaataagtatctagagtagatatcgacgattacttgggtagctcctgataattcatcttctaataagcttagtttcgtctgatcattagctttttttaaagcagctttagttacaattgtttcgcaaaaagttgaagcagtctccgcaattggcataggatagtcactatttaaaatagattcatcatttaaacattcaccatggaagccatgacctagctcgtgagccatcgtaattgcatcagaaaagctgtcaccataatttaataaaaaacgactttccttgatactatgaagattgcaacaaaaggctccgccaactttaccgctttggggataaacatcaatccaattattttcaattgcttttttcgcaaaagtacctaaatgttcagaaaaggtactaaattgattaataataaattggcagcttttttcgtatggatgactgtcatgatcttcgataacaggggcataaagctcaaaccaaggtaatccgttttgatatccaagggcagtagctttagtttttagataatccctaaagacactaaggttttcttgcatcacagttaataaaacatctaatgtttcttttgacattcgtgcattgataagggttctttctagttcattttcataccctcttaatttagtagtatagagtacttctcctttgattccgtttaaacaagcagcaatagcctgttctttatcttgataactgtttatttctgcttggtaagcttttttacgtatttcgcgatccttatcataggccatatttaaaaccgaagttagagggtaggtttggtcctcgatagttacttcaattgatgaaattaattgatcttttagtttgctaaaagcattactaccagtattttgcatgtgtgcaatgatgctctcactctttttatctaaagtgtatttttgattttgctgaatttcttttaaaataaatagatgttccttgattaagtttgattttaatgaatcaagcttaaaagtactgatccattgttgatttaagacttcatcttcaacaaaagaagctaaaaggttatctagctgatcgctatattttaaagcaatgctatttgttgtatcgactgataaagttaaactaatataattagctactttttcaattagttgatttaattttattaaatcgactaaataattttctaatgatttttcatcattgttattacgatatgtatttatttgtttttgtaatttaatgatttggttaaaatcagtagtaaaactagaatcatcaaatgattgatataatcttgataaatcccattctttcattttctatcacctcgtataatatattttgtaaagattacagcacctttacaatcttaatttcatattggattttcctaagtaataatattctttttcaccttgctgcattctacttaatgagtctgtctttcaattttagaatgaattacctcatcgaatattgtttattcaatatattttgatgcgtagccttgattaatattgttttattcttatggcgagattatgacatatctaaagaacagaggttagtcaagtatttatttttagttatatttcaattgaaaggtgctgattttatgaatacactctatgtagatattgatgaatcaactcaaaacaatcaagtttatgcaatgaactttaatcaggacatttttaatataacttccctaacaatcctgatagatgtgataatcttatcttaactgttaagacttttgtcgataaagaaaaatttgattctataatcatcttagctaatctacttctatatacgactatcatatttgggcttatttaatagagcagctcaattgttattataccaaaatattgaaataaattaacaaactttatgctgataatgatttaattgttttcagcaagaaaaaaactgattagcagcaatgtgcataatttctcatcatgtaaatcaacattggtaagttccttgatcttttctaaacgataaagtagtgtattgcggtggatagccaattgttcaattgttttatgagagtcaccaaaattacaaatatacgattttaaagtatgataataatcattcttagttgattcatcaatttgttttagttttgtaataagtggatggagatatatcttgtatgaactagtagtaaaaaatgattctaaagcaatatcttcaaaaaaagtaaattgctgtttacttaaatcgtaagctttcagtgcttgttgtttataaatattaatatctaacagattatcgaaaatataactaataccaaactttaatttataaatatttacagcagttattaaactttttactttattaataatattgttttttgttgctctattaagcccggtaattaaaatatataagcagttatcttggagataagaatatgtatttggtaaagtaataatatgctgatgaagttgatttaaatacactatctcattgctttttaagcctacctttgtagtaataatacagtaatctctgctaaaattattgggttgtgcaggtaataatttttctaaatcatgtttatttatattgtcatttgagaataagtaattcattattgcaaaatattcgtaacgattataattatagccggttttgctgtgacaaataatagatgcgatagttttagctaatttactgataaaactgaatatttcagatgatggcttgccatctgcaaataaaatgcataagtaaccaataatattatcattgtctgttattgctgcaataattcgtggaattgtctgcccaactccgtaatcgacatagataacattattattttgatccaaatctttttgataattacctaattggataaatgggagcatctcaactgctactttttgatgttcttgcatgtgatcaaagagcatatctccaatttgttgatttggatgttgtgccaaaactacataattcacatcacataagaccattggatgatggaaatattcgtataattgtttcataaattgatgcagattatgatttattaatccattgaatagaaattcatacatatctttcataagctcacctcctttatattataaatgtagttgtgcaatttgcacaaccagtaattaaatatttgtatttttgcccatggtatttttttaacaagaaagataaaatttaattattgacggaggtaatttatatgaaatacgatgcattatttacaccttttaaaataggtaatatggaagtgaaaaatcgttttgttatggcaccaatgggaactaattcttcacatattgatggatgtattgctaatgatgaaattgattattttgaagcgcgagctaaaggtggggttggattgatcattatgggatgtcaatttttaaatcctgatttagcacaaggatcattagaaggagtcttacaaaatagttacgttattcctcaattgacaactgtagttgaagcgacacatcgttggggggcaaaaatttgttgtcaaattagttgtggaactggaagaaatgcttttcctaacatgtatggagaaccaccattctcttcaagtgatacaccatcaacatttaatcctgaaatgaagtgtcgtccattgagtaaagaagatattaaaaaaattatgacagagtttgctaatagcgcaataattgctaaaaacgctggttttgatgcaatagaaattcatggacatgcgggctatttggttgatcaattcatgtcgcctgtatggaataagcgaactgatgaatatggtggtagtgctgaaaatagaatgcgttttgctacagaaattgtgcaatctataaaacaggcagttgatttaccagttatatttagaattgctttagatcatctatttgcagagggtagaaccttggatgaaagtatggaattaattgagattttagaaaaagctggggtagatgctttagatattgacgcaggatgttatgaacggattgattatattttcccaactgcatatttaggtgatgcttgtatggattatgtatgcaaagaagcgcgcaaacatgtaaatattccgatcatgaatgctggaaatcatacacctgaatcagcacttcgattaattgaatctaaagatgctgattttgttatgtttggtcgtcaatttattgcggatccagatacagtaaataaattgatgagcgatcatgaagaggatgttcgcccatgtattcgctgcaatgaagaatgtgtagggagaattgtcggacgtcttactaagttgagttgtgcagtaaatcctcaagcatgtgaagaagaacgttttgcaattaagccatgtagtcaagtaaaaaatattgttgtgattggtgcaggacctgctggattagaagctgctagagtagctgctgctgaaggacataatgtggaaatttatgaaaagactaatatgattggtggacaattaagtgttgctgcgacaccaaaatttaaggatcaattaaagaaattagttaaatggtttgaagtacaattaaataaattggatgtaataatacactttaattatgaagtaaaagcagatgatcaaattttaaaaaatgcagatcaaattattgtggcctgtggagcagatgaaattatacctccaataaatggtatcaataatgagaatgtaattagtgtaattgacgcacatatgcacaaaggtatgattaaaggtgaaaatgtcattatgtgtggtgggggattgtcaggtattgatagtgccattgaacttgctagtgaacatggtaaaaatgttacaataattgagatggctgatagtattgctaaagatgtattatttattaaccaggcttcaatttttgcaaagattgatgaatataaaattaatgtgattaccggtgctaaagttgttgagtttaataatgatggcattacttatcaaaaagatggacaagaagttgtttgtaaagcggatacgattattagagcatttggaatgaaaccaaatcgaaaattagctgaagaaattagaaatatttatccaactaaaacaagaattgttggagatagtgaaaagattggtaaggtcgctaatgctatacgtgatggattctatgcgggaatgtctttataaaaataaaaaagttcgttatattagcgaacttttttaatgtatattatgtttacaaaaagctccgtaatttagtaaaatagtgtatatagatgacttatttttaagagaaggtaggagaaatatggtaaagatattactgggattgttaaaaaatatttgtgaagaaaattatgaaggatattacgactaaatggatagaaaaagaagaagacaagaatcaaaagtaaattctattatagctgaagatatcaacatgcagcaaatctaaaaaaaatatattggacaattccccaaattaaaaaaaattaagagactatttttttgattttcatgattttatgataaaatgctgcgatgatgattgtgatgttaatatacaaaatgatctaattaacaagttagaaatagaatataatttgaataaaagaatattttcaaatgctttagagtttaaagaacagcttctagaaataaaaaatgattttaataattattttaatcagatgagtaatacaacttatatatcttttgaggatatagaagatgataagttagttttatataatatccttgaagaatattttgaggttttaaaaacatatgtgacaaataaaacagagagaagatttttaaaagttgttatgttagatattaatagaaaaatagatatttctaaaaattttaaactgtttgataattcattttcaaatattagttggattgttgttttatttgtatttataattgttttgttagtaagcttaatgagtttttttaattctttattagagcaatttataatatttatggttaattatttcctaggtaaaaatacagtaataaatttgaaaaaaattatagaaaatgttattttatttgtttcttttttaatttcagttggtattatgaaactaatatttaagaaaattggaaataaaataataaatattttacctgaaatttcattgcattttcctagaagcaattatgaaagacagttgtattacacatttttatcagtattagtttctactgctgctttatttataagctatgcagcattaaccttaaaatagtgtttattttatttaaacttataattatttaaaagaaattttataggatttattatatgtatggtggtcaaggatttttagtagctcattgccaatttttctacatgcaaaataaaatataataccatcatcataatcaaaggtaatattatttttatgatctgtatcatgtttagctagattatataaattggttagatgcttaattttatagcatagtttatactctaagatgtttttgtctgaaagaaagctaatatttttacctaacattcgtgtattttttataaactttagtttagaatttttagagactaatatctttattagagattcaatatgtagtcccgaatcagttatcacaaatcgagctctagagccaatatacatgtcgcttcttgcgtattgtaagcttctaaatacatttctatattcattaaattgattaaagggattaactattacgtttaaagggcaggcataaccacctagcccttttagtgattgatcatatttccatattttttcatgataaatcgtgttccttatttttgatctataaatattagctaattcatttaataagataatctcttggtaattaaagttatcctttaaaataatctctgtttcctttcgcatatgtcacctcatataatcaatatttttgaatgatatagtcaaataattcttttcttatttcattttctagtctataagtaaattgaattgctgaatttttgttatcaggtaattgtaccttgaatggttcattaattgcgtgcatttgacccatataataaaattctttagaagtagtgtcatttttattctttcttacaaataaatgaatttgaagatgattatttgcctcgtcataaattctttggatttcatcggaatcaatactacgattaggtttcgaaaaacaaataagagtacttgcatcaacaaaacgatgtaaatattttccaccttgattagcatcatgatcatgattaataaaaacaggcatagtattagttctttgatcatatttataaccgccaatatttaaaggtacggcattaacttcccagtttaataatctacatacatcctcgtaggtgtatttttgatataaacatagatcagtatctttatgtgtattagtatagtttgttttatatctattaattccaaattcgattaattcaagtaattgttttttaaaattactatcttgtaataattcaattaattgatgatgagtgtttaaattatcatctataaagatagcatcttgaaatgttgttttagctccaccggtagcaaattcttgttttaattgattgattattggaagataattaacttctttaaatttaatcttatattcatttaataatcgttcttttaatcgtgtaataatattttcttgatattcaatacatagtttgattgctaaaagttcatgaattcgtttaccagcagcaaatttactggaaatgtattcaagatatttttcttgtaatggtgtgaatttaatcttatagtctttttcattttttgttaagaatttatggtatgaaccaaaagttttattttgaaagattcttaatacatcaatggaatcatataaatcaaaatcagctaaattaggaattctacctaatttatgttttaaatgtaaataactgtctttaatgattttagtatcattaaatttagctcgatcaattgattcatagattttctttttagaaactaagtcaaaattgattgtggaagctcctggcattaataaactgccctcactgacaaatcttcttaaggcatctttgttgtaagtataatttccacttaaagcaatagggattaagaagttcttttcataattaccaataaaatcaataattacaacatattctttggatggacttttacgtaatcctcgtcctaattgctggacaaagacaattgctgattgggtagggcgtaacataataacttgatttaccttaggaatatcgattccttcattaaagatatctactgtaaaaatataatctagactgtcaccatcattgctttctaatttatcgattgctttttgacgtttgatttcactgtcatcaccggttaaggcacaggttcgataaccacgtttattaaattctattgataattcaacagcttcagttttacgactgcaaaatattaatcctctaactcgattacctgaatgaccatataattctattttattaataatatgatttattcgttcagctgttattaagtcattaaattttgttttatcatcaatgttttttccatcaactataaaatcagatataccataataatgaaaaggacataataaattatattccattgcctgttgtaaccgaatttcataagcaatgttataatcaaacattttatatatatcaaaattatcagatctttcaggggttgctgacattcctaatagaaagctaggtataaagtaattcattaattcttgatatgacttagcaccagcacggtgaacttcatcaataatgatgtaatcaaaagtatctggcttaaacatttctcgatattcttttttatgaattgtttgaacagttgaaaagatataatcactattaatatctttttcgctaccagtaaaaataccaaaagtatgattcttgattatgtttttaaaagtattcatagcatcacgagcaatattctcacgatgaacaacaaataatattcttttgggatcaatatttttaacatcaaaagcactgagatatgttttaccagttcctgttgccgaaatcaacaaagctttatttttatgattatttcgtaatgctgttaacgaagccagggcttcttgctgcattaaattaggatgaatatttttatgtttaataactggtataactggtttaggaacatatattttttcatattcactaatccatgattttgttaaaggaacagaatgaagccattgcatattaaattcatctatcatttctttaactatatcatcacatatactagcttgaatcttaatattccattcctgatttgttgataatgcagattgggttagattagagctcccaacaataatatcaaagttatttttatgtttaaagatataacctttaggatgaaaaccaatttcttcattgtcaaatatgtgtacttcaatattatcaaacatcaataattccttaaatacattagggtgattaaaccctaagtatgttgaggttattattttacctttaattcctctatcttttaaattgatcaatgactgttttagtactgctaaacctgatttattaataaaggcaatagagaaataaaacgtatcacatgaatttaattgactaattaattcatgtgatattttaataccttgtttatagttattagttagtaatttagttttatttttattatcaattaaagttttagattgtaataatgtatccatgatatgctccttgttgatatcaatagtataatgcattttagtgacaataactagcgatttacctgtattaatgttaaaatatattaagaaacgggtgataattatggctgattgtatgacaaaagaacaacgttcaagaaatatgtcacatattaaaagtaaagatacttcaatagagttaaaagtaagaaagtatttatatcatcacggttttcgatatagaaaaaatgataaaacattacccggaacaccagatatagtactttctaaatatcgaactgttatttttattaacggctgtttttggcatcaccattttaactgtaaatatgcaacactgcctaaaacaagacaagattattggttaaagaaaattaataagaatgttgaaaatgatttaaagcattataaggaattagagcaaatggattataaagtcattgttgtatgggaatgtgaattaaaagaatgctttgaatacaggatggagaaactggttgaggagataactgaactaatgatataaagtttaaattagagtataataatttaaaaattgcaaaatatatagtaatgtaatatcttctataataaggtaactaaggattgatctaattttttattctgcaaaactattaatacagctaacaattaaaaaataccaaacttaaattatgtcattacgaacaatcggtattatggtggaaaaagaataatagaactctttttgtaaattggttaataaaccagatagttttatgcattttgatatgaaaattatttatagatatgaggattttaatgaatgaataaaaactattaactaaaacttaaattttaaatgtggaaaatgaaaatatatcatagttattttggagattgtgatgatatttatttagttttttatgaactgtcactataaaatatagagggaatactatagccaatcaaaatttgataaaagacatgaagagtttcccagacatcaaaacaggctcttacaattcagtagttgcatatatactagtattatgataaagaagtaattgttaaatgagtagaaaaacaatttttaatatctctattaattattacacattgctaaaagtattgttgattatgtgtttgatgaaataaagataaacaagggaactggaagaatatatcaatctttagttaaatatattttagaactgtgagaattaggaaatgatagtagttaagttatagatatttttaataaaatagttaatgaatattcaatatgtaaagttttgattgagaaaatgcaaaagattttgtcaattgtatatcaataaataaaaaaactcaaaaaccaaaatagtttgatatttgagtcctaaggagattattccatattttctgataaattattaataaaactatcataattataactatgaataatactttgctgtaacttagcattattaacaatttcaataaagatatcataaaggtgctcaatgtcttgttggtcaccttgttttattgctagtaaaaagataatctgaaccgtatcttgttgataccaggttaatggtttatcgatgatagcaacagcaactttagtatctttagcacataggcgcataggatgtggtaatgcaaatacttcattcatattagtttttgctaaattttcacgttccataacacaatcaaaataattgctatcaacaatattttgtttttccattaattgacacatttgttttaataaagattctttagagtctattccatctaaatgaataaagaggtttttatcaaaaaatttatttgatttcttcattttatttaaagaaattgatgttagaaatttagagattgcttcgatatcttgattatttaaagcaaagtcaacagtaatggtaggaatatgttcactctttaacggaattgtcgaaataacaaagtcaacattcaacaattctctttttgtataattaataaattcgttatatgaagctttacgaacaattgttatcttatctttaaagaaaacatttaatctagcttctaacattcttgttgtagcttgaccagaaccacagactaaaataacacttttgttttgaagacttcctgaaaaacaacgctcaatcgcagctccgatatgcaaagaaacataaccaacttcatcttcagttaaaatatatggtggcttattaaagatttttgcggtacacgttaaagtaatatcaaatgctaaaggaaaattagttttaatggtatttaataatgggtttcgtttatttaacgcaaatgatttagtatttaagatagatttaaaatgtaaaaagaggtcatgtgacaaaatttcatcattacgcaaatcaaaattataatcgaaatatatattattcaataattcttctactaactccttgattttattatcattatcgactaagtcgtttaattgtgtattggctactaaatgtgaataaatatattttttttcaccttcactaatcgtaatattaaaagtatactcaatttcatttgcaatatcatcaataaaatcagtataattatcatcaattttaatagtattgttcgtattgatataacagtcaaattgaattcttgagatcattaaagcaaaatggatgattaggtttttaaaattaaaatcatttgtttttatatgtgcattttttaatttattagagataatttgtttaagaagatctagatcaattccctcaaaaagagtatattcatcttttgtaaagccggtaacatagttttgaaagttgtacgataaaacattttcaactagacatttgcgtttatcatcttcattaccaattattttgaccccgacattagtttttgagatatattcaagattatattttgaaaaaatagcttttaaagttttaatatagttttgtaacgtatttttactcacatagatattatcagccaaatcatctagactcatatattcatcactatataataataaatttaataaatatttaatccgatcttgagaactgtctaattctaaattactagttcttgtttgttttattgagcataaaaaagtattatatttttcttgatcattgatctcaatataatatccagcttttctttttaattttatttttgctccatttttttcaagaatttcattaattgcctgaatatcactacggatcgttctatctgtgatgtttaatagaactgataactgacttgcagatactatattatcttgtctgacatagtcaaatatttcatttaaacgattgtatggaaacatcattatcacgattccttccttattatgtctatattgtatagataattatttttgattgcaaataattgatttccattttattttggaaatcttgatgtttataaagtaaaagtttccgttaataagtggaaatagcattgattgaaataaatttagattcgagatagactatagttgtagcaaggaggtagtaacggaatgcttaatgaagattatatatttttggatgtgaaagtgacgaataaaaatcaattattagggtttattgcagacaaagcccatgaatataatatttgtgacaatcgagaaggactgcttgaagatttaataaaacgtgaagcagaatttccaacaggattgcaagatggattcgcaattccgcatgcacgtagtaaccatgtcaaaaaggctgcaattttatatttaagaactgatgaagcaattgagtggggaactatggatgataaaaaagtgaattatttattttcattgttagttcctgaacaaaatgaaggaaatcttcatttacagatgatatctaaattagctacttgtttattagaagatgagtttaagaatacggtaaaatcttcaactaataaatcggcgctaaaagattatatattaaaaaatatggaggtagattaaatgaaaatcgttggtattgccgcttgtcctgcgggattagcacacacacctatggcagctaaagccttagaaaaagcaggagctaaattaggttatgatttaaaaatggagcagcaaggaagtatgggtcaggtcaacaagattactgaggaagaggctaaagaagcagcttttgtaattgtagcatcagatcaaaaaattctaggaatggagcgttttgaaggaaaaccggtaattagaattgatattacaacttgtatcaaagctccggaggcggtcataaaaaaatgtgttcaagcaacacaaaaataaaaaagcaatttaacttggcggagtcaaattgcatacacaaaactatagtgagtagtgtgtactctcattataacataaaatatgaaaagagaggtaaaacgaatgaaaaagtttttaaaagatgctaaaggacatataatgtcaggaattggttatatgctacctttaattattggggcatcactagttgtggctattccaaaattgataggggtagcgatgggaatcaatagtcttgatgcttatgcaacaaaagatgggttcttacacatcttatatttattagagcaggtaggttggacaggtattggcttagttaatactgtattagctggtttcattgccttttcaattgctgacaaacctgctattggagctggtttaattggtggggcattagctagtaatacaaaagccggttttttaggagctgttattgctgcgtttatcgctggatatattgtaaaatggggtaaagaacatatcaaattacctgattcaatgcagcaaatgatgccgttagttattttaccatttttagcaactggtgccgttgctataattatgggagttattcttgcgactccactagcctcaattaatgatgctttagtatcgtggttaagagatatgtgtagtggtggaactagccaattgatcctttcattagttttaggagcaatgattgcttcagatatgggtggaccaatcaataagtcagcatggatggctggaaatgttttaatgacagaaggaatttatcaaccaaatgtatatattaattgtgctatttgtattcccccattagcatatgcaattgctactgtaattaagaaaaatcgtttttcaccaagttttaaagaagccggtaaaggtaactgggttatgggatttattggtattaccgaaggagcgattccttttacattagttaaggctagccgtttaattcctattaatatgattggtggagctttaggagcaggaatctgttgtttacttggagcaactgctgatattccgccagttggaggaatgtatggatttgtttcaatcactggtggttgggcttatcttgttggaattattgttggagctttatttattgcaattgtagcaccaatggttgttgattttaatgatgataaagatgaagaagagacaatatcagttgatgatattgaaatagtaattgaataaaaaataggaagatgaaaatcttcctattaaattaaaggagttaatatgaaaagaaaagtacatgtgatccctcattcacattgggatcgagaatggtattttacaacttcaagatcaaaagtttatttaatgaaagatcttaaagacgttttagatacattagagacaaataatgattttaaatattttatggtcgatgctcaaggttcattattagaagattacattaaatggatgccacaagataaacaaagaattaaaaaacttgtcaaagctaaaaaattaatcattggaccttggtatactcaaagtgatcaactagtaatttctggtgaaagtatcgttcgaaatatgtattatggaatgaagtattgtgaaactttcggagagtatatgaatgtgggttatgttcctgattcatttggacagtcaggtaatatgcctcaaatatatcgccagtttggaattgaagatactttattttggcgaggcgttagtgatgatatggtcaaacataccgattataattggcgtggtgatgatggcagtgttgtttttactacccaaattccttttggttattatattggtggaaatatacccgaagatgataaagcaagtgatgagttttggcaaaaagaatgttttgaaaaagccggcagccgtagtgctacaaaacatatttacttccctaatggttttgatcaggctcctattcgtaaaaatcttcctgatttgattaagaaaagaaatgaaaaagatcctgataatgaatacattattagttgtgttgaagactatattaaagatgtaaagagtgaaaaacctgatttagaagaagtgagtggtgaattagtaattgccaagcatatgcggattcataaatcgattttttcatcgcgaagtgatttgaaagtgttaaatacgcaagtacaaaattatgttactaatattttagaaccgatgttaacaatgtcgtatcatttaggtaatgattatcctcatagtgcagttagtgagatttggaaattgttatttgaaaatgcagctcatgattcaattggatcatgtatttctgataacgctaatgaagatgtatatatgcgctataaacaagctcgggatattgcggttaatttagttgagttacattcacgtttgattgcaactaaaatcaagaataaaactaataatgagatcaccttaacattatttaatacattaccaaaaaaacgtaatgatacaattatttttgaaacatatttaccagctgataattttgcaattaaggataatcatggtaaccatgttaaatatactgtaattgaaaaaacagatcttacggactatgttttatcacaaacaattcgattaaatcctagtaaaaatatttatttgccaagtgtagtctatcaagcaaagattgccatcgaagctagagatgtaccagcattaggttatgtgcaatatacaattgatttggatgataaatctaatgacgatcttcaagaaataacaagcatggaaaatgagtattatcaaattacagttaataagcaaggaagtcttgatatctatgataaactagctgattatcattatcaaaatcaagctgttcttgttgaaaatggtgatgatggtgacagcttcaattactcgccgccacgtcaggatttagaaatattttctattaacagtgaatttgattaccagataactggctctagtctttatcaaaagacaacgatcaattataaaatggatattcctgctgatttacaagaacgggctaaacaacagacaagtattaagttaccagtaactttagaagtggttttaagaaaaggttcaaatataattgatctaaacgtacatgtcgataatcaaggattatcacatcgtttatgcatcttatttgatagtgcgctgacgactaaattcaattatgctgatcagcagtttggtttgatcaaacgaccaaacacttatgataaagaaatggagttatatcttgaagggttaggaaaccaggagaaggcagaaaaaccaaaagaattagctaattgggtcaatgatcaatctacttggcaagaaccaccaatatcaattgaaccaacgcaaagctatgttgctcttgccaataaaagtagaggaattgcggttattccccaaggggttcgcgaatatgaaatcattggtgagcaaggaaatcaaattagattaacattgtttagaacatatggttttatgggtaaagaaaatttagtttatcgccccggtcgagcttcaggcgaaagaatcattgcaactccagctgcccagttattaaaagaaatggattttaaattaggatttaccacttttaactgtgatatcaataatgctaatattgatactttagccaaagaatataacaccccaattgaagtatatgaatatgctgatttcttaaatggtagattgatttttgcccaagaagatgaggaacaaattttaccagttactaattcattatttgaaagtgaaaataacttagttgttagtgcaatcaaaaagagtgaagatggtgaaggatatataattcgtctatttaatggtaaagatcatcaggatattggtgataaactaacttttaattttgatataagtgaagcatattatactaatttaaaggaagagaagattgagcaaataaatgttgttgataatagtgtagtaattaaaccaatatcacattgtaaatttattacgattttaataaaataattataataaacctatatagaaaagtacaatcattatgattgtaattctaataggtttttttattataatcacatattttttattagagcaatgattaaaagtaatagtagggagttgatttttaaggggctaagttaatatatttttaaatataaaatggtaaaaatattgatatatatttttttattaagatatgaaaagggggaaaagtgcgtaagtgagaataaaattaatcaaaaaataaaaatgtaaatataaatactataaatattagtattaatcctaaaaaagacgcctatttaatatagtattaaacataattaaaaaatatttttactagaaaataataacagttaatttttgttgttattaatgtaagcgcttttgcttatgagataaatatatattataataaaaatatgtaaaaaaatggagagtatagagatggatgtatatgaaataaagataaaattatatttattgaaagatataaaaattgaagaaacacagacttatttagcatactttattgatagtgtaatggttaaagataatatgtttttaggtatacatgagactaatcagtataagttttatacttttgatagtttgtatcctttagctaaaaatggggtttatcaaaaagataattcgtatgtgtttagaataagaacgttagattatcaattagctcaatatttatatgatactttagctaaaaatcggactaaagaatttcaaggtctgaccgctgaggttaaaataattaaaccaaaattaatcaaaaaaatatatacacttacaccagtgattttaaaaacagagcagggatactggaaaaacagcattaaaacagaggattttgaaaaacgattaaaaactaatttaatcaaaaaatacaaagatataactggtgaagaaattaatgaagattttcaattatattatcaaattaattttaaaaataaggttccggtatcgagaaaatataaaggaattaaattgttaggggatatgattgaattagaaattgcggaaaatgataatgctcaaaaattagcaatgttagctattggagcaggtttgttagaaatgaacgctagaggatttggatttgttaattacatatattattgaaaggaggttatataatgcttgatgaatgtttacgaatttttaagcaagagcttaaagataatacaaatttagttttaaatacaataattttggctgacggggattatgttttagtacatgatgatggtacttatgatgtagaaaaaattaaatattcaaaaaaagatcattgttttattgaaaaacctgaagatgatctatatgaaaaattatgtttttatgattatcaaagtcaagtaatagatacccaaaaaacttttgatcttcctcataaattaattctttcaaataactatttatcatattttgtaaaaaaagaaaaattgaataataaaaagaaaattaatgatgcaactgaaaaatattttttagcattaagtaatcctagagctaagtataatggtaaagatttagagatgtataattttgtgactcaaaatatcagcgaagttgataaaagaagattattgcaaaataagcagtggttaaaacaatatatttataatttggatggtgttgattataatgaaaaagattatttaaagattttttttgaagcagattatcatcaatatattaatgaaggaaaccgttatcttttgacaaaaatatttaactgtaacgattataacacttatgaaaatgaaacagtgtatggagtaccaaattataatatgcaattaaattctaacaaaccatttttaaaaaatatgacaagaatgcataaagttccatttaaactttccttggaagaagcattgatacaaaaacagttttttgattatttattaaattatgctaataaaggtaaaacaaatatctatattagtagtaatgagaatgatactaaaagaatttattttttagataacaccaaaaaaataaaaaagggatttaatgggctttatcttaaaattaaaaaagacaaagaattaaaaatagagtatatagatacagttactgattataaagaatatttaagtcctatgtttaattttcgaaatgtgattggtgcttttgatgatgaatactatcaagagtataataaaagaaatgaggtagaaaaattacttaatgatgtcttgttttccaagtttttaattaataattattttacggatccagatagtataataagtattaagggtgaaaatattgatgtttataaaaagaatcttattacgtgtagagaagcaatttttgcttggatacatgtaggggcagtgggaaatattaaaaatattttgccaaaagcagcgttagaaacaacgattcactctataaaaatgggacatattaaattggctcaaagacaatttaatctttattttgctataaatgaatattttaataaacaggagaatggtatgaaagatctaagagaaagtattagaacaaaaataaattcccaacagcaaatgaaaatagaaaatgatttagaatatagttttgcagttggacaagcaatagcttatcttcagtcaaagagcaaagctaagaataaaactcaagattttattaatcaatttataactattaagagagatgattctatgaaatcaaaattgaaaaatttatacttacattataattatgctttatctacaggtaagacacgtttcaatatgttgtttgggatgattatggaatatcagagtgatcaaaaaataaatcaaaacatgttgattgctggttatattggagaaaacttaatttatgaaaagggagaaaacgaaaatggataaaagagtatatggagtgattggagtatcatcaaaaatggcaaattggaatgctgatttttctggctatcctagaagtctatctgatggaacgatttttggtagtgacaaagctttaaaatatccaatgagaaaaatgtgggacaatgaaggtaaaaaggtattatatatgaaatctatgaatttttcaaaaaaaaatgatactataacattagtaccaaattcattaaaagagagatatgaaaaattatttgctgttgatgatttaaaaaaatgtaaagataataaggaagtattaactaatttaatgactgctgttgatgttaaaaactttggagcaacatttgcagaagctaaaaataatatttcaattactggtgctgttcagtttgggcagggaattaataaatatggtgatagtgatcttgaaacaatgcaaatactatcaccatttagagatacaaaagatgcagaagcaaaaaattcaactatagggactaaaaaaataatcaatgaagcacattatttctatcctttttcaattaatcctagtgcttataaagaacttgtggctttaggagtcacagatggctacactgaagaagattatttaaattttaaaagaacggctttagtagcagcaacttctttttcatcaaacgctaaagaaggatgtcaaaatgaatttgctttatttgtggaaactaaattggatacatatttaccaaatttaagcgagtatattagttttgaaaaagcagatattaataaaattaaaattgaatgtaacatgttaaatgaattagaagatattttaaatattgaaatttattataatcctgaaacaacagttttagaatctaatttagaaaaagctaaaatctataatttgattactaaaaaagaggtgtagatatgcaagcacttaagtttactttaagtggtaaaactgctttttttaagcgaccggaagtaaatacgtattattttacttttggtaatattcatagagttgcgctattaggaatatttggggcaattttaggttatcagggctataataatacaattgaactaccagagttttatcaaaaattaaaagatatcaaattatctattttgcctcaaaatgaaaagggttatttttcaaagaaaattcaatattataacaattcagttggttatgcatccaaacaacaaggaggtaatttaattataaaagaacaatggctggaaaatgtttgttgggatattgttgttttgttggataatgaggaggcgaataaattagctaaagctataataaacaaaaaatgtatttttataccctatttaggtaaaaatgatcatccagctaatatcactgatcctgtaattgttgatttacaaaaacgtgatattgataaagaaacgcttgactgcttatttccttcaggaaatttcaaaaaagcagaggatgtatatgttaatttttataaatatcaagaaagtttaccaattggattaaatgaaaaaacgggattgtatgagtatatgacatttattcatacgaacttttatgtggataaaggtgcagtatatagttttaatgataaaaacattgtattttattaacccgctattaagcgggttttattgaagggagaatattatggatatcgataaatatctagtttcgctagaaaaaataataattaatattgatcagtgctatggacatagagatgatgatcatcaagaaacaattaatgaacatattcaattatgcacgaaatatttaaaagagatatttaaattaaagaaattggattcaattttaaaatcttttaacatttctttaggagaggggttatcaaatgaaggaaaagaaatgtttaatgagttattttttaacacaattacctttcatgataccggaaaaataaatccgttttttcaaaaaaataaaatgaataatccagtaatgaattatttaaatccgccaaaaaatttaaaatctgatcattcgaaattatcggcatacatctatttaggaacttatttaaataaattgaataggttatcaaggaatgatattggattaataaaaccgattgtttatataaatgcatttgttatttctcgacatcatgctaagattgatgattttagaacatattttatggataaacttgacagtgatgatattttggaaaaaagaattattgaatggatgaacgatgagaaatttataagtcagtttactgagaaattaagtctcgattcattgaatacagatgagtataattatatatttgaaaagctagagaaatatgaaatgaatatacaaatagatctatatgcttatgttagattcttatattcacttctggttttttgtgattattatgcaacaagtgaattttatggtgataataaaaacaatgtaatgcttaaagatgctgattttggtgaaatcattgaactatatgataatagtgaattagttactaagattagaaaaaatgatattggtaaagaaaaaatcaatgcattaagaacaaaagtattcttagaagcggaaagaaatttactagaaaatattgataaaaatattttttatttagaagctccaaccgggagtggtaaaagtaacacagcattaaatcttagtttacgtttaattgaaaatgatgatagtttaaataagataatatatgtatatccttttaatacattagtagaacaaaatctagcatcgttaaataaaatttttggtaatagtaaggctatgaataatattgctgtcgttaattctacaactccattaaaaaaggatgaagatgaaaacttttcggatgaatatcaaaaagcattattagaccgtcaatttctaacatatccaattattctaacgacccacgtaggtttgtttgatactttctttggaaataaccgagaatcagcgtttggtctatgtcaatatgcaaattcggtaatagttttagatgaaatccaaaattatcgaattgaaatatggaatgagatgatcatcttcttaaaagagtttgctcaaattcttaatctaaaaataattatcatgtcagcaacattaccagatttagaattacttacagatgatcgtagtaattcagtttcattaataacaaatcctcaagaatattttttaaatccaatttttaaagatcgagtaaaaacagattatagtctaataaatgtagaaaatactgaagaagcgttattaaatcatgttttagagatgaataagctaaagaaaaaaataatgattgagtttattgttagaaaaagtgcagaaaagttctatcgtcaattaaaagagatagaattagattgtgaagttttatttattagtggttttgatagtgtattagaaagagaaaaaatcattagtactgttaaaacttcaaaacatcttattttagtagcaacccaggtaattgaagccggtgtcgatattgatatggatatcggttataaagatatatctaaacttgatagtgaagaacagtttatgggaagaataaatcgctcatgtaaagaagatggaaaaggaatagtatatttctttaatttaaataaggcaaccaatatttataagggggatgaacgtgttgcacagaaaaatttaacattgtttaatgatgatatgaaaaaagtattgttaaaaaagaactataattattattaccaaaaacttcttaagactctagcaaatagagctaaaaagcctgaagaaaaaaatgttcccaatttttttagagaaagtgttgcgtgtttagattatcaggcagtaagtaaacgaatggaattgatattagatactagagatcgagtaacgatatttttaggaagaacggtaattaatattgatggggaagaatttgatggtaaagatatttggaatcagtatgtagatttattgaaaaataatgaaatggattatgctaaaaaagtatatgagttgtcagtggttaaaagtatgatgaattattttatgtatcaagttattaaaaaaaatcaatttgattttaaagagcaggttggagatatttattatattgaaaatggtgatgattatattttagatggtaaattaaatacagccctttttgaaactgaggatgagttatttatatagaggtaagaatatggaagtaaatggaacattaataaactattattttcattgtcaaaggcaatgttatcttcatggtaatcgacttaatttagaggatgaaagtgaaaatgtgaagattggtaaagcattgcatgaagaaaagtataaagatgataagaattcagagattgcaattgataatattaggttagataaattaactgcaaaatatttaactgaaacaaaaaagtctgatgctgatttagttgcagcaaagtggcaactattatattatcttaaaattttaaagtcaaaaggaataatacgaaaaggacgaatagaagtaattgaaaagaataaacaaaataaatcttttattgaagtggagctaacagaaattgaagaaaaagaattagataaaattgttattaaaattaaagaattattagaaaatgatcaaataccaccagttttaaatgaaaataaatgtaaaaaatgtgcatattatgcatattgttatatataggaggtgttgtaatgaaaagtactaaatacataactagtatgggagatttaaaacgtaaagatgattcgctttgttttagaaaaagtggtaagaatatatatttaccagtagaaaatataaaagagatatattgtttaaatgaaatttctcttaatactaaattattagattttatctcatctaaaaatataattattcatttttttaactattatcagggttatagtggtaccttttatccaaaagataaatatactagtggtaaattgttgattaaacaggttgaaacatttaataattatcgtattgatattgcaaaagcaatagttaatggtattgcaattaacattgatgaaactttatatcactattataagcatggtaaaaatgaggttaaagaaacaatagactggttaagaaaagaggtgccaaaacgtttaaaagaagcagaagatattaaaatgattatggcggttgaaggagaaacatggcaacgtttttatagtatgtttagatatatactacctgaagattttataatgaacaaaagagtaaagagaccgcccgataatccaattaatgcactaatttcttttggaaacactttactttatacaaaaacaatttcagcgatatatcaaactcacttaaatcaaagtatttcttttttacatgaacctacagaacaaagattttctttgtctttagacttaagtgaagtatttaaaccgatcattgtttttaaaacaatctttgaattagtcaatactaaaagattaacggttgagaaacattttgataagaaaactaattattgtcttttaaatgataaaggtagggatatatttattgaagcttttgaaaatagaatggaaactaaatttttacatactaaattaaagagaaagataacatataaaacagctattaaatatgatggttataaattgattaaaacaatttttgaaaataaatcatttataccattttctataaaggataaatattaatgaaaataaaaaatcataactatgtaatcgtctgttacgatattggggaaaaaagagtaaataaaatatttaagatatgtaaaaaatatcttcctcattatcaatattctatttttaagggtcctattaccccatctaaattaattttattaaaaaaagaactaaaaaaagctataaacaaagaagaagattgtgtaagtattattaaattacagagtgaggattcatttgatgaagagattttagggagtcgaaaagagggaaatgaagatagtttaattatataatttaccaggctcaatttctttttaatgtcctaaagctgttgggagagtaagcgtttaagagaattttactggcaattataaaaaagtaaaatcatttggtaaaaaagtagaaaagtattgatagatataggttttgaggtataatagaaagtgtaaaatggcttatttactagggtttaataacaacataagatgtattgaaatataatttctacttctttaactgtcttttccatttttgtttaataacaacataagatgtattgaaataatgtaagagttataaaataatcccaatcattgagagtttaataacaacataagatgtattgaaatttagcaaactgagaaagcttaatgtattgtttatagtttaataacaacataagatgtattgaaatatagaaattctcccattataataccactcactatcgtttaataacaacataagatgtattgaaatcgccttcccaaacttctttaaaaacttcatcccacgtttaataacaacataagatgtattgaaatttcaatgattcgctaaagttttcgatacctgcacagtttaataacaacataagatgtattgaaataaattaaactcattttccataacttcacctactttagtttaataacaacataagatgtattgaaatcaggtgaagagtatgttgttgattgttatggacgtgtttaataacaacataagatgtattgaaatgggtacttgcaactgcacctaatttgtctattacgtttaataacaacataagatgtattgaaattttactggaaaaattattgatgtttatgtcactgagtttaataacaacataagatgtattgaaatttaccgtacttattccttaaattcaaagcgattttagtttaataacaacataagatgtattgaaatgatggaatgaaatagatgatctaattggaaagcctgtgtttaataacaacataagatgtattgaaataacccatttggataatccatccacataccaacaggtttaataacaacataagatgtattgaaataattaatttgtttagcatcttctcctttttcccatgtttaataacaacataagatgtattgaaatttaaataaaaagctgaaagacataagggtatagagtttaataacaacataagatgtattgaaatattaatactactaaccaatcaaacataaatacttcaagtttaataacaacataagatgtattgaaatttaattatctttcgatacatatttaatcttgatttgtttaataacaacataagatgtattgaaatttatcatcatttgtattgtttttagaaactgtacgtttaataacaacataagatgtattgaaatgataccatctacaccaatggaagcactgggattaagtttaataacaacataagatgtattgaaatacgatctgtttagttttagtacttgttacctggaatgtttaataacaacataagatgtattgaaatccgttaaactctttccaatgttcccatgtaagacgtttaataacaacataagatgtattgaaatgtgtagtttagtgcacgctcgctgtctgctactccgtttaataacaacataagatgtattgaaatttcgtattctagtgttaatatttctaggattttcagtttaataacaacataagatgtattgaaattaggcaacttctagttcaaatttatattttagtaatgtttaataacaacataagatgtattgaaattattgttaggtcatttaacagttttgtttgatgtctagtttaataacaacataagatgtattgaaataccaatagttggtcttgattgtctaactgttggttgtttaataacaacataagatgtattgaaattaaaatacagttgtaatagagccttgctcactatgtttaataacaacataagatgtattgaaataacatttctttagcgcttaattcttctatcattttagtttaataacaacgagatattaaagtgaaaaaacatgactattttgttcatattactattaataaaatatttttttgttataataaaagtaaaagtaagtagaagtggggtaattatgacaaataagtatagattaaaaataatatataaagatactaaattgacattagacattgaggaaaatattacttttgatgaattaagctcaattattaatgaaaaattaatgctaagtgattcgagagcttataaatatcaaaaagatgatgatattattgttacaagaaaaaatagtaaaaacaataaactagcagatcttttagaattagatcagaagttagtttatattattggtactggtaataatgtttatagtattaatatcatcgtttgggactacattattgaagctgataaaaaaatattagagaagtttaatcaaatgttgaaaaatgtcaaacaagtacgtcctgaacaagtatattatttaaatagtagtcaaagaaagtttattgacggtcttttggctgactgttatgaaatgttgaaagaaatgagttttagtggaatttataattaccgcttatttaaaaatggtgctgattttttaacaacgaaagtcatctattatattcttgatgataaatatgaaattcatttatataacaataatgatgatttaaaggaagataatacagaatatttaataactttttatgatactaatcgagcttattttaaaggataccaaggagttaatcgtaatattttcattcttcacaaagataaaacaattaaacaaaatgattttgaatatctttatcacgctttaaatcgtatcattcatatgttcaaggatggtgatgaagatacattatttgaaagccatgaaacatgtttatgttatgacattgcaactaataaattttggactgaataataaaaaagcatcgtcttattatactaacgataagacgatgtttttatt

SEQ ID NO: 223 - DNA, 93835 bp, Thomasclavelia ramosa
  source 1..93835: mol_type = genomic DNA
tttctccttttattttcttatcctaaaattccaaattgtgcacagacaataccaataaatgctgtaccaataatcaaccataatacattaacctttttttgtagaagtttataataaattcctgttgttgccaatgctaacatccctggcataattccatttaaaatatcctgaatttttgtagcgctttcgccacttccaatgactagaggagttgatactgctactaattcatttgtcattccaccaataaccattactcctaaaattgctgctgctaacatgaatttttccattaatccagaactttgaattttttctaaataagttgctccaagttcataacctttcatagcacagatatatcttaaaacgaatgctggaacattgaaaattaataagaataaaattggccctaaaatatttccttgcattgctaaagatgtccctataccaattgctaatactcttaatgtcccaagtaacaatgaatcgccaataccacttaatggtcccattaatgcagctttaacagcattaattgatgatgaatcaaaatcttcttgtgttgcattcatttcttccattgctaaagtaatcccaccaacaaaagttgaaacatgtggtgttatattaaagaactctaaatgtctttgaagtgcctctgataatcctttaggatcatttatatatatcttctttaatcctgcacttatcatactacaaaatcccatgtgcatttgtctttcgtaatgccatgaaaattccattggtaacgatctccaaaacatttttattaaatctttttttgtaataactttttcattattagaagtcttcgtcatcttcatatcctccttctgtcattactaaattattatcatttttaaaatcaatctttaagaatacagcaattacaccaagaatagcaattcctacaactggaattttaaaatatgctgataaaacaaatcctaagaagaaaaatggaataactttcttattcataatcatttgagctaacattgcaaatccaattccaggtaataaaccacatgcaattgataatccatcagtaataaccgcaggaattgcattaacaatagcttccatttgtgaacttcctaaagcaaatcctaaaaaagtaatcaaaaataatactgaacatgtaataaaaccagttcccatatgtactatagttattgctttagcattacctttagcagcatatttatctgcaatttttgccataaatggtcttactaaagaaaaaataacattgtcaattgcttgagctaataaagcaattggaaaggccatagtaaaagcaatttctgcacctttacctgtagtaattgcaaatgctgtacctagtactccaccaacaataacatttggtggaatatatgcaccaacagaaacttgccctaaaaacgctaattctaaagttgcacctacaacaattcccatttgtaaatcccctaaaatcaaaccaaccaatggaccaagcacgatcggtctttgtattaagtttgtacctgttgctaaatcacattttccaataaatgctacgcaacctaataaaaacgcctgtaacataattcttcttcctctctatataacatcttttgcatcaattttcttgtcggttggaaccatacgaatttctacagaatactctttattcaataaatctttaacaagttcaatttctttttctgttaaattcactgccttagaaatattctttgtttcagcagtagccttagttccacccaaaacaacactatcaatcacatgagtttcagtcattaaacgatatgcatctttaacgctctcaacaacaataaatagtttgtatttatctgttacaccactattgattgactgaatggcatcatcaatattttttaaaaccaactttactccttgtggtttggccatcttaatagccatttttttcaattcatcttgcataagtgcatcattagcaatcaaaatacaatctgctccaagagcacttgtccaagagaatgcaacttgtccatgtagtagtcgatgatcaactcttaaacatttaatcataacttcttccccttttactaaaattcttcttcttcaatatctttttttaaagttacactattttccaatgtgattcctacttttccactatctaatacatgatcaatatttacatttccggaattattagatataaccaattcaagaaccatattcatattcataccagagataagattcactctttcattattacacgtctgcaataatgcattataaacgctacctcctttaacatcgcatacaatcacataatcttttgtatctgcttcaattctcttttttaaagaagcagcataatcatttggattttcaccaggatataaactatatgtttcaatatcttttgcaagttctccaacaatcattgaaactgagtttaacattcctttagataaatcaccatgtgatgctaaaattatttttaccataacgtccactcctttcactgattaccaagcaagaagcgtgccaaaataataaatgtactttaatttttttatttttttgttgaagttaccggacacttatatctgagcaaaactcgtgccaaaataaaaatccatataaacctattttgtttatatggacatatattaatcattttctacataagagtaaatatattcaatttcttcagttgggatttcaacattataaaattcctcaacctttttcatagattgttttaaagctataataaaatcttgatgtttctctttaaaatcatcactattatatactgttatctgttgtttcatgattaacctttcaatcaagcaactgatatgtatatacaagccaaagcacgttttatttttaaattgatgatttaatattttttgtagttcatctaaagcagtagaaacttgttcaagaagtttgtttggatttaggattgttaaattgttcataacattcgataacgagaaatttttaagaatatttttttcaaagataagcaattgatcatttgaaagataatctttaaaatactgctctaatttatcatgttcactattaataataaaatcttcgattcctataaatggtaaatcactcatattagggtttaatgttcctacaacacatacgatattgtaatcttctaaaaattggcgatcagtatgattttgaataagcgatggatagtcatatgtcaaaactttcatatttaatccttttggtaatgaatcggtaataattgttttcaatttttctgcagcaccaatgccactagcacaactgcataaaataattggttctttttggtgatgaagttcaaggtggacatgataaggattgtttttgttgatgtcttcaaaaatgtcttgcatagagcgttgttgtttaattcccatgccaatttctaaagcaagtttggtattaacattgtttatcatggctatatctacattttttatttgtattccttgatatatttcttctaaagatcccatatcaaccaataaatataaatgtttaattttccccatataagataaataattattgatcttgttaataattgtcgtgctatccacatttaacggcatatcaatagcatcaaaaacatatgtatctaataatttatttgctgattcagcaatagaacttgcagttgaataaccatgtgccaatataatcgcaagtgtttggtttaatgaatcatgattcatatatttatttaaaataatcatcataatgacttgtaccattgcatcataagcatcattgatattattttttaaatagtcatagacttcatttgctattaagtattctctatgaaactttgcttttaagttttcttgaaaacaataaatggtttgttcattctcatttacccattttgccagtttataagtattatgattatattccaataaatagcttgtgagtgcaataacctcattatgcgacattttaaaaccatagcgattcgtcatcatgtctaatacatgacctacagtatctaagagatagttattttgacttaaatcttttttatcaaatacaattttttcaaagtaatcttcaataagttttcttgattgtgttatgaaatcttcttgattatgaagatgaattaaattttcataaaaatgaatagtacgattttgtaaagatgttggaataagtgtatcgagtgataacatttgatgtttcttcatcattaattgttctggattaaccatttccataatagtttgaggaaaatgataagcatgaatttctagtttatcatcttggcaattgaataacgcactcacacaacttgattgaatcacattgcttaattccccaatatttcctataaaattatgatttaatagaagctgataaacattagaagaaatccgaatcgttttctttatccttttttcttctttatgataaagggaataaatcaattgtactctttcattaacccctctttgtgataaagagggaatttgtaaaataacaggtattcttcttaaaagtgtttttaaaagaacctgctttggatcttctgttgttgcaaaaataatacgacaatgtgattgatgccatttatcattatcacccatcatatgataaattccttgatccatgtataaaaataatttttcttggcattccgctttcaaacaatgcacttcatctaaaaataacattcctccattagcataatgaagcaatcctaaattatctttatctgcacctgtaaaggcaccacgcttatagccaaataaattagccgttaataactctggattgtttgcatattctgaacaattgatttgtacaaattgtttatctttgtcaatcaatctcttgtttatacaatattcataggttagcttagcaaggaaagattttccagtacccgtaggtccatttagtaatattggtaatcctaccggtggatatgatactgttgcttttattttttcaacaagatggttgagactatcgttatatccaatgagtttttcaaaatcatgtaaaatatgttcattttctaattccataagtaaatcttgtaattgtgagtattcctttttcaaatgctcttttttatattttgtttgtagataatctttatctaaaaatatgattggtctttgttttattttgatgaatacatcttgttcatacaattcattacataaggtagaaacataattacgactttgtttgagttgttgagatatttctatacaagtacatttatcaaatgctttttgatcaataaattggtgaatacaatctaatattttcttttccatgatttcaccttcctttgttgttatcttaatcatttcaattacgactgtcaaggtctatttttttactctttttctacatattttggcatgaattttgctattattatattaggtagaggtgattgtgatgaagcaaaagttaggtatgaaacaaacttataaacaaacttttcaattaaatcaaaaaatgattcattcccttgattttttaaagttaaacagtgaagatatgcaaagtcttattgataatgctttacaaacaaacccttttttagaattaaggaaagcatatgatccttcaaatcattcttacattgaaaatatttctaatcatccttctttacaagaggaattatatcaccaactttatgcttgtttaaaatcttatgattctcatattatgtcttatcttattgaatctttaaatgatcgtggatttttaagttatagttatgatgtttatttaaaagaattacagattgatgaaaatacattttttaagcatttagaacttttacagtcttttgaacctgctggtgtcgctgctagtgatgctattgattctatatgtattcagttaaagagaaaaggcaaggaaaatgcttattgtttgatgaagaaatacaaagatattattcttacgcagaattatcatcaaatcaaacaaacaacccatcttacacaaagagaaattgatattctttttgaagatattaagcaatgtcagccatttccatgtcaaaattattcaaatcaaaatgatatttatgttttaccagatattgatattattattgaaaatgaaaatattcaaattgtccctattaaccaaccaaatgtgatggtaaatgatcatctctatcaaagtgttagagataacgaagatatgaaaaacttttttaatgaagctcattttcttttggaaaacttaaccaaaagaaataagactgtcttaatggtagctaatgaattggttgacttacaaaaaagttattttctctataatgatgaattggtttcttgtacgttagctgacttagcacaaaaatgtggttttcatgaatctacgatatctcgtacacttcatcataaatattatcgttttaataatgaggtttatcctttaaagaacttattggtatctaaaactttaagtggtgatagtagtgattctatcaaaaaggcaattgtcttattaattcacaatgaagataaacaaaagcctttaactgatgaagccatagtttctaagttagaagaactggatttatattgttccagacgagtgattgtaaaatatcgccaacaattaaatataccctcatcttctaagcgaaaaagaaaatagtcttttaaagtatttaaaaaatgccttttgtctatcaaagaacacaatggggtcaacttaagaaatactttgtttttaacagctctaacaaacataataagacaatttactcgcttgattaattctttttctaatattattcattccaaaatcgttaataatttatgtcgaactcgttttcaggattttatcggaatacgtgtcatgacttttgatatagttgttttctaacttatattcagaaacagaaaaaatactgatgcagatcttattaaatttttctcatgtcttgatatttttgaaaagaagattaccaaacaggctatgcataagaatatcagaaaacttaattcaaatgttttttcattattaatttaaacagtttgctcaattattttattcctcaggattaagcttatactatactataagggttacacacttctcggtggggacggtactttttagaaatttcatatgatacctataatatcaattactttggcatatggtaaaaccaacatgtttgtgatatgtttgatgtgaaaaagattgtttccaaaccagctggtctatatgatatcactaatggcatttttgttgatttcacaacaaaaacaggcaacccattcagaaatgccacttgcacttcaacatttatatgctacaagtgatttgtacaaagatatgaaagtcatatatttagctgataggtgctatggctctgctgggttgatctgtttttttgattatcttggatattattactgcattagaggaaagtcatatttttacaaaagccaaatttcacagatgaaatcaaacgatgaatatataacgattaatattaatgataagtggcttaagagattttcattctctcctgaggcaattgaatatagaagaaaaaattccgaattaaaaataagagtcgttaaaagaaattacatatattatgatgagctagaaatgcgacaggttcaagaaatgacttactttacaaatctgcctaaggaggaatttgaaaaaagaaagatggaagatctgtattcaaaacgatgggatattgaagttgcgtacaaaacattaaaaactcaattagaacttgaaagaaatgtatcaactaatgtctaagttgtacaaacgaatgtatatgcaaagttttgttttacaatatggcgggaatactaagaaaacaaattaatcgagaacttatgagtcatccaaaacagaatgaaacaaaagagtataaagaaaatgtaattgtatttgaatctcaatattgggttgtcaacatatcacagcttatcaactgttttatggaaaataatattttagtagcatgttcaataaaaacaagagagcgatagtgaaaagatatatcagatgttaaaagcatgtgagaaactaaaagtgcctattcaagagaatagacactttgaatgatgaggttgagttgttccgagcggattttatacccgttttacacttgatgatcgaaactttccaacagtaaaaaccgtcaatggtgtaatgaaaacaaccaaaccgtagttaaatattacacgataatcatagtacattacaatttcaaaaaaatgataaattttacatagggattttatgcatttttttacgtgttttaattggaaatatcaattgattaattatgttagtacaatggaaagaaaaggtaatacagatagcatatttatccactctctccttaaacgaaatacactacattaatgtattctaaatgagaaattaagacacccacttatatttgttgaaatagaattaaagattataataattgagcctgtaaattattttgtgtaaagtctgtttccaatgatagaatttgatgagtaactgtattgagtaatcatacagttacttttttatatcatatcataatatatttaattgtaaatgttctcgttaaaccctcccttcaaagatgatttgaagactagaatatataattccccaattaccatatgggacattccatttacttgttattttatcttgagctaagtacaaagatttaaataaactttcatctgttgggaatactgttcttattttagtaaactttctaaatgttctctttctacacattctactatatccataacgttcttcgtcatataatcttataatttctttcttgtccatataagttaattttgccataataaaaccccaaagattgtacttgttatattagtccaatctttggggttcatttcaaacgaactacacacttaaacattaattatttgattttataaaatggattttaaactgtttatatccatttatttatatcgtttgactttttattcttgtagtttaattattcaaaatttgtatgtctttgaaacatactatctgaattttcgtttaatttttattgtaaaactcagcttttatcaatttataactgctgaacaaagcgcattgctgcaatcacaatatctatcacatgcctaattgcatatttattatattttgctttacacgaaggaactataagcttatttttagaaaactcaatatcacagttgcaagtaattagccaagtattaacttctgcatgaactaaacgtgaaatgattcttttgttcagctgaaaaatagtcccattagtacttaaaataatcaaaagatgctcttctttaaactgatatgattttatgaaatctgcatcacaaattacaaccggaatatatagagtacttaattctacttgaataacattacagagagaacgattatctccttgagcatatagataaacctttttacttcttaaaatatcgttaatcagacgattaagatgtgaataattaatcttctcccctacatatgtaattgtttttgacatagactgagcaaacatttttgtattttgaggaagatcacattcttttgaaaagaatgacggtttatcttgaaaagaatgtatataatcaatacaagcgtctttaaactctaaataagaagtaaagccaagatttttagcacattttgaaatctgtcctttagaggtatggcaagcttttgcgacctcttcgatagtcatatccgcgatatcatgaatatgggatttggtataagaacaaaacacatacatcgtagtatatgtttcaacatgattaagaacatcatttaatttatcaaccatcataatagccatccccttttttttattatacacgaaaaactcttactcatacatagtaagagttttcagtttaaactactaaccaagatcttctccattagttttgataactttttgataccaatagaaagaatcttttttatatcttttcatgctcccatgaccgtaatcgtcactatcaacataaatatatccatatcgtttactgcgctcagaagtccctgcactgacaatatcaatacatccccatgacgtatacccaataactttaactccttcatctatacaaatcttcatttgctgaatatgttcttttagatatttaatacgataatcatcatggattttcttatctattgtcagagtatcatatgtgcctaagccattttctgaaacaataatagctttatgatagcgatcccatacctcattaatagccacccttagtccaattggatcaatttggaagccccaatctgtaacttctaaattttcattacgaacttttcttggatgaaattcatcaataacttcattttcaggaacaaaagcaatcagcccttcttcattttcaggatgtgcagacgtacataaagaataataatagctaaaagaattaaaatcgactgtgttctctctaagcagcgataagtcttcttccatcatcttcaattcaatattttttttcttcatataagaaagtgcatattcaggatattcaccttttgataataaatctaagaaaaaataatttacacgatttgcccattgagcagccaaaatatcctctggattatttgtctttggataatataaagacatacctaacattgatcctatttgaaaattaggattaatttcccgtgctttttttgctactaacgcactagcaataaattgatgatgcaaagcttgaaaaatagtttctaattcattttgtgatttttcaatgaaaatagcaccgcctgtataaggtaaatgcaaagacatattgatttcattaaaaggtatccaatattttactttatttcgatagcgtttgaaaactgttaccgcataatgaacaaagaattcaatcattttcctattttcccatccattatactttaaagcaagctggagaggggtttcataatgcgacaatgtaactagcggctcaatcccatattttaaacattcatcaaacacattatcataaaaccttaatccctcttcatttggctcttgttcttccccgtttggaaatattcttgtccaattgattgacatacggaagcatctaaatcccatttctgccattaaagcaatatcttctttataatgatgataaaaatcaatcccccatcttttgggataatattcattatcgtgctttccattcattatttctattgcttcttcataagtaacagtttctgtatttttgccacagcttatttctctaggaacaaactttaccatatcggctgtactcaatcccttaccaccttcattatacgctccctctaattgattagcagctgttgcaccaccccataaaaaatcattaggaaatcgtctcataacataactcctttctattgattagtctgttgtttattcgccaaggcaacaaatggtaaataaatcaaaacacaaattataaatacaaaacaaactgaaatagcagtctcccacgaacctgaagctgataaaaacgctttaataggctgtggtgttgtccatccaacatctaatgttccaggcaaaacaagtcctgtagaaatcatcaatgcgcctagacccattgaaacaattggacttaagataaacggaattacaaggattggatttaatacgattggcaaaccaaagataataggttcattgatacaaaataatcctggaataagaccaatctttgcagtttttgtataatcagctcttttccatcccttctttcgcgaaagaatcaaaatagcaacaatcaacgctaatgtattacccgtcccaccaatacatccatagttttcaaacaaggcaaaccatgtatatggatacggagagcccgcagttgttcctgcctgtgctgcataagaaatattagcaatattcatagaagcatataaagtaatataaatcggagaaacagtaaaggttccatgaattcctactgaccataagatcattgccataaaaataagaatcataggtgtaaacggtgtagctcctaaagactgaataggggcttgtaaaatcgcataaactaaagcatttaatccttgaggctctatcagcgaaatacaataagcaataacagagattaaaataatgatgattgcggtaggaatagcaatcataaatgattttgatacttcaggtggaacctgatccggcatcttaatttgaagtttatcgatctttgttaacttactaaaaccatatccaactagtaaccctgtaattatagcaacaaaaattccatttgcccctagataagattccgttaacattccatcaaccttaggtggatataatacaaagaatgaagctaaagcagttaatccagcttttaatccatctacttcatactgttttgccatatttcttgcaattaagaaaacaataaaaacagccatgagattaattgttccgttacttacaggagataaaactgcttgaaaatcatctaaatcaggaattattttaacaagaaattgaccaataaatcctgatgaacttaataaaacaacattaatacaaacaacaattgatcctacaaatgtaagagggaatatttgaacaaaagcatcccgaatagcaataagccctttaatactattaagctttgttgcaaagggcataaaatatctttcaaaaaaactatttaaagcttgcatacttacttcctccttttcaccaagtcattcatttaaaaagagtcatacaaatattgtataaaatggagtgcactatttgatttaaaattacctgatcagttctattataaatcgccttatatcctcccctctctttacttaaattatagataatacaatttttttaatcaaaatagtttccttaaatggaaactattttttgccagtactatctagataggtattaaaaaatcttgatgattcaaaataaagaacatttcaatctttaaatcattaaatataattttcaccagtttaagccgattcatgcatatattcagaaatcaaaaaatagttttcattaattatttttatctcaattaaaatatataaaaaagaagagattttctctcttctaataatagttcaacattttaaaatatgttttattcatcatttcttctactagtgattctttttgaaaccctttattcacataagtctccatttctaaaaacatagatttattttttagattctcaactttcatagaatgtatatcaataccatatttatcaaaaacttcacgaatatctttcaatgcataatcttcataatagatttccatttgtatgttttgattattttgtgtgacctttaaaaagaaccccctatgaaacaatatctgtaatcctatcaaaataattgttgttataattccgatatcatataatcctgcaccaatacacattcctactccagatgttgcccacattccagcagcagttgttaaacctgaaacattaccattctttacaaaaataacgcctgcgcccaaaaaaccaacgccgcttacgatttgggcagctatacgagaaccatctatttcatttatgtctataaaaccatattttgatactaacattattaaagcagaccccaaagcaaggatagcatgtgtacgcacccccgcccccttatttcgactacttcgttcatagccaatcaaacagccgcaaaatgcagcaatcataattcttataacccatattccatgatttactatatagaatttaatatcaaatggcaaaattcccaccacctattcacaatatatttctttcaatcttcttcttttttcgttatcaaaattatattcttgtaataaaaattcatcataacttctatatttaacccgaattgattgaatcattatttcaatcaattctctttgaacatataataagggtctacattcctcccttaatttctcaggaatttgtagctgctgacataattcatcattactttcttttaaataaatattggataacaagtattcttggattgcatcttcttcactcattcctagagcaatcataatcaaaaagccggcaactccagtcctatcttttccagcagtacagtgaaaataaacatagccatcatttcttaataacaattcgaacaagcgatgatacgcaggattattaaaagccatctctttatatcctgctttgatataagacattagatagttgtatttttctttagtcatctctccttgcagcatagtaccaaaatcaaaaccatattgatcatgcgattgcattttaagagcactgatacgttcatataaaatattttcatgctgcttatccggtgctaagcttgcttcagcttcatctctaaaatcaagaatatattttatttttaaatgatcaacaaaatgattttgttcttttatagttaatttatctaaagcaccacccctaaaaatcatgtagggttttattacaaaaccatcttgagagctatatcccttaatatctctaaaatttttaatattaactattcgcatcttatctacccatttcctctttcaattcatcaaattgctctttagttaatccaaaatcaccaattgcagttaaatggatattatggaaatcactaccaccacttcttataagatgaaatctatttgcaagttcctgtgttaaagaataatcttcagattccatactaggatgtgatatttcaattccctgtaagccatagctgacatatttttcaatttcatcataatttttatattcacaaggatgggcaataatagcaattcctccatcctcacgaattgcctttatcccctctttaatatcgatatatcccattttagagtctacatctagcgaagtctcgctcataaacaattctcgatacttattaatatcattatactcaggatacttatgaacaatcgccaagaataaatgcattttgaagacaatattatacggagcgtattctttagcgtcttcgtaagtaatatttaagcccttttgatttaatattttaataagttcatgatgatactcatccctacattgtaaagtcttttgacatagtttttcaacatgatacggatggttatttaaccccaaaccaacaacatgcacctttttgtgtacatcgtagtcataacagctcatttcaaccccacgaattgtttctaaaccattttgccggcataccttttgcacttctttgaaatgaaaaacagtatcatgatcagtaattgcaatcactttaattcctttttccttagctaatttgatcgtttcttcaatagaatgaataccatcactataagcagtgtgaacatgtaaatctgcatacaccatattatcacatccttaaataatagttaaaactggatcagtttttgttacttttttcaattttgttggaataacttctaaataatcattagagtttgttacaacaaccatagttgtatagtctaagcccgcttctttaatcatttttaagtcaaattctaataacaatgaccccgcttttacatactcacctttttcaacatattgaataaatggttttccttctaatttaacggtatcaattccaacatgaattagaatttcagagccattttcagttgttaagccaattgcatgttttgtttcaaaagttgcacttataatcccattagcaggagcatagatttttccttctacaggaataatagcaacacccttccctaaaacttcttttgaaaacatttcatcgttaacttcgtttaatggaacaatcttccctttaacaggacaattcacttgatttaatttattatcatcgtgttttacttcactttctttcggatcatcaaaaccaataactaaagttgcaataaacgttacaacagctgaaataatcatagtaataatagcattcataagattattagggttgttcccccctacccacattggtaaattaataatgctaggagtcatgaaagcaaatgcttttaatccacaaaaaccagcatataatcctccagtaaaacttccaatcataactgcatacataggctttttcaaacgaattgacacaccatagatacatggctctgtaattcctgcaaagaaagcagtaaatccggcagataagcaggtattcctaaaatctctattttttgttttaaccgcacaagcaaaagcagcagcaccttgcgccatgttcgctgttaaagttaaagttcttgaaaatgggtcatatcctgattgtgataaaatctgaattcctgcaattgctagagtagcatgcatacccgttgcaaccatccatggataaataatacacataattgcaatagcaaacattccaaatgtatcatagcaccataacaatgcattacccaaataaattgaaataatccccatagctggcgctaatacaacaaatgctaacggtgtcataatcagcaatgtaaataacggtgttaacatccctctaaccaattctggcaatactttattcaatccaaattctactttgctcataacaaaaacaattaaaatagctggaattaaagttgatgtatacggcattccatataaaggtaagaaaccaaacatatctccaataaattttggatcagtcgctgaaacaataccactccattgtggatgaaccagcgcacagccaagtaaagctgccatatacatattacatttaaaatgctttgcagctgccactgcggtaaataccggcaagaaagtaaagccagcatcaaatacaaaattaaatacataataagtcattgatgtttcggcatttgcccatcccatcattgatacaaataataaaatacatttccccagccctgttcctactaaaataggaataattggaccgacgcagccaataattgcagaaaaaatagaattaaaaattccttttttttcttttttgtttccaaaattttcatcttctttaatatttgcaatctggcatacatcaagatacacatcatgaacatgtgtaccaataacaacctgatattgaccacctttcttgattaatgacaaaactccatcaattgcttcaattttttgatcatttgcttttgattcatcctttaaagtaaatctcaaacgcgtcatacaatgctgcaaagttacaatattattactccctcctacagcttcaataatgttttttgaaagtttttcatatttcattctcttttcctccattcttttgaaaacttcaaaatgtgaaggtttggccaacttaatgttaccatccaacaaatatctatttgcaaattattttttagaaataatttttgcaacatgaatcgtaagatataaaacttcctcatcatttaattcataatgataagtcttttcaatatgcgattgtatttttgaagtacaaagatatgactcaacatatttttccttcataatttcaagcaagtcattatttaaggttatatcttccacttgctttattttattaaaaacacgtaatccaaaaaattttaaatgtgttacaaatctataataagataaagaatcttcatccaactctaatttaaaataatcttttacaataccaataatctctaatatgaaatttgttatttcataaatatcactgatatttctaccaacctcactactcactatatgtaatgctaaaaatgccgcttcatcctcttccatgtttattccatatttttctttaataagttttaaagttaataaacctaactcaaattctttaggatagaaattcttaatttcaaataacatatgattttttaaataaacgccttctttataccgctctatgcttgtatgaatatgatctgttaaactgatataaagagaatcatcgacttctaagtctacttttgcttctttgataacacaatcagatatctccatatattcgagaggaatatcctttaacatattaatcatttttctttgacttggttttaaacttacttcaaaagttttattgatcttattcatatcaatattatcaccggcttgttttccataagccaagcctttccccataacaataatttcctccatttgatagttagttgtaataacaacattattatttaaaattttctttataatcatattcattcacccctgtataaatataaaaaacctgccacagaaaaatatctgtaaacaggtttagtgttgcctcatatgtgcaataactatccataaattacatatttatattatcattcctcgcaaaatttgtcaacgctttcaaaataaaggatttgatttaaaacaaccaaaaattctattaaaaattaaatactgatattaaattattttcaacctaaataatgattaggtcttctatagccatacctagataaccaaaataaatctattcaatgtaattataattgattatatatctaataatcacaaatcttaaaaataatactaaataaggttagataagcacaccctatcattataacttagtattagggttatattttttgaggctgcttacatcattataaattatttgtctaaaaattacgaatacataatttttccagtaactcaccaatataatacagtgatacatagccagtatttattgaccactctactccgtaacgataaaaaatatctaccttgtcagcaacctctttattataatcctggcttatataaataaccttagccccaacttcttttgcattttctaacgcatcatggtagtgaaaaaaaccgtcacatacattaatgataacaacaactgaattttcattaaaaaaatagctcctaaccgtcttcgtttcactgactttaaacagatatgcgcacttccccgaagtcaataatttgatttgcaacaaaaggaattcatcaagatcatgctcatcacctagaaaagtaatatcctcgctttccttaaataactgaacaatttttaaaagcgttgctaaatcaagattctcttttgttgcaacaagattatcaagacactgttgaaaaagatattcactgatttcttcattacttttaaaaagaatattctgtgataaaaatactttcaaattataatctaagagtgttgtttgagttgataatagggttctaaattgctgataattttcaaaactatatttttttataaatcttgaaatacttgccttagatacattcgcctctcgagctaattcattaatagaagggaatgttttttttccaatatacttaaatacattttgaataatattataatcattactattaacagcttcgctgttacatctttgaataaaggttaagaaactttctagtatttcctcatccatttttatcagctcctttccctatattataacatcttgataatataaaagaatatgagtcttcaaaatattagactcatatcaattaaaatactttttctttattacaactattgctcccccacttaacaaaataaatagacaataaactccaaacagcgaaggatcatccgtcttaggtgccagcacagcagtatgtgatgattgtttagttatctgatcattctctactatatctagaacattagtatcagcagtaatattaaacattgtagctgcttgtccctcattggcgattattactaatatatgttctccaattgttaatgttgaaataagttcttttggtaaaataatggttattagatcaccagaaacagtatactttgatctatcaatttcttgatcatcaattatgagcattttgaataatgacgatggtatgtcagtctttattttaagttcttctccctgtttaatatttttattagctccatctgttatacaatattcaatattttcttgattccataggatatctttagcaaatgttgtaaaagctccacgccacgtattccagtcatgtcccccattttgtatttcaaaagtataatcaatattttcagcatctaatttaggtaacataaaatctaagatagaggccttaaaaaaagaattaatcaacccaaaatcaactgttcctgccgaaagatagattttctttgtctgtaattttgaaataagttcgtctgtaaatacttcatcatcaatttgaacagctgctgaaataataccaaaatatccaaaactatcaggtgcaatttccattactgtacttgccgcaacaccaccagctgacaatccagcataagctcgatccttaggatcagttgaaaccttataattcttttcaataaaaggaattacattattaacaacatcttgagccaatatgacattcgatttaatatcaaatcctgtcccgctaaaatgcgaattatttaatgtcacgattatactatcagctagttctccttcagcaattagattatcaacaatattacctgctgatcctaattgacaccattcagtttcgttgcccccattaccatgtgctaaataaatcgttttatagttattccctaaactataaccattcggtaaataaatcccaagacaattttcagttccatcataagcgatgtatgtatcgtattgataagaacccatattattatttcttggataaatataagattgacccgctaatgcatctgaactatttccaacataaaaataggaccaagtagcatcatgattattaatttcattcttttttgaaggattaacaggatcctgcacaactactgcagatccatcactataagttacaaaatatccataaaaatattctgttgctggtaatggtaaggtgacagaatataaattttcatcttttaccatatcatagagaatatagttttcattataattaaactcagttcgttcagtatttccgcatcctccagtaggatacattccctgctcatattcataagccgaataccaccttattccatcattgcttgccccgttttcttgataccagggagcttcagaactcttaataaattggaagcctccttgtaattggatattttcaacattttcccctaattttgtactgtcaacaacaaaggttacttggtactttgcctcactaaggccggttgtgttatcagtaatagttattccctcattaacagcatgtacattactcattgagaatacacccaaagataacaatagtgtaaaacaaattcctatctgtaaaatccatctttttacttgtctcatatttcttcctcctaaaccaagaataacaaaccaaccactttctgtatacgtttacaaacgaaacttagttacagaaaatgaaactaatattcttgcataaccgcaaatcatcagaaattataactatataaaataaagatcacttccttattgtaaggaaggtactttcttgttaatatattgattatgtagttttcaacaagttattaattcaaattaattctgaaaaggaggtttcaatgaactactttgagtatagctattccactagcagcactacaactatttttatatttattttcatcctcttaaatataattgcacgatggcgtttattcactaaagctagacgttggggaatcagtgcttttattccaatttatagtgatattgcattatgtcgaattgtaaaactttcaccactttggcttctatttcttttaattccccttattaatatgtactttattatcttttatcacattgttattagttttaaactttcttttgcatttggaaaaggcataatgttcggacttggcttgttagttttcaacccactgttcattttaatattagggtttgggaattgtgaatatcgttactaataaaaatagatatagttatcatttgtaaacacaaaaattaatagaactatcaacttaaataaatatcaaaattaatttgcatatttgttcaaaaaatgtaaagagactctaaaaataatcaacttttttaaaataaaaaagaaattctacgaattccttttaactgcgatacatcaaatacatttgattaatttcttcttttatcttatctcttaattccaacggtttaaaaacctcaacatgattagctaattgtaaaaagccactgactaactttttatcatcaggaacccgttcaattgaaacatttacaaatcgacggaattgttcaactgtgaatgtacatcccttaaatcgttgatacaaagcttcaaaaatattctcatttcctaaatacacacgtaattcaatgttgatcaaattatcttttccaatatcaagcggatcattagataaccagattcgctccttaaaacactcagtctttgcttggatatatttaggggtacgagttattttcaattgatcaatgcgatcaattcgataatatgccaattcaaaatcttcactactatttattaggtaaccaactaaatatacttgatcattttttatatcaatattagttggatataataaaattgttttatgactaggcctatctataactttgttttcaacaacactatattccaattctttaaatgatagacaagcaaatgtatttatagccttaataatttgctctaaatacactgtaatacaattatcttcataagttgaattgatattatctaacaaatgataatgatttattttatacaaagaactatctgataatactttttctaataattttgaatcattttgactttctaaatgtaatcctcgacctaataaccttgtcaataaaattaattgagcatcagtataatatgtcttttcaacgtacgcaccttttttttgttttgttgcataattaatactaccactttcattgcatataaaaggggtaagcaactcatcttgacaatcttttatcaaattattataagattttattgattcaatatctgctttaatcgtattgctagaaatcgtcgttcctaacccaccaattcttttaattagttcatcacgtgataaagcatgatcttcgtctgttaatctttttaataaatattgcgttagcaatatgcgagttccattactaatatctcccattcctcaaccctccatactctatattttactttatcttccaaaatatgtaaaattagtaaatataataaaaaccaattatttggtgtataaaattgtatacataaaattaatttcactatccagcaaaaaagtatatgtttatgacaaatttatgacaataaaaaagactaattaattaattagtcttgatattttctaataaaactatcaattttactccaataaacttgaccaccaattttttcacattgagcatgtccggcacccttgattaccaatttttccttaggacaattagcactttgatataattgattgagcattttaaaagggacaaaacgatccttatcgccatgaataaataatgttggcgtagttgattttttcacttgttcgattgcttcagctttgccaaatgaataaccggctcgaatctgagtcacaatatttgcaatatctaaaaatggtcgacttggcaaattatacatttcttttagctgataggaaaacatctcccatgtactagtgaatccacaatcttcaatagcagcaataacattgacaggcaatttttcccctgttacattcattactgtagccgctcccatagatactccatacaggataattttaacttttgaatcattatcaattaaatatttgatccagttaattatgtctaaacgatcgagccagcccattgcaatatagtcaccttcactctgcccatgacctcgaagatcaggaagcaaaagattgtaaccttgctcataaaaatgtttagcactcgcatgcatcaatttaccttcagatgtatatccatggacaataatcacataatcatgcccgtaattcaaaaattgataagcatgcagttttaatccatcatcactgtctaagaatacatcctgataatgaatagtatcaaaaaaattgctactatctcccttcttatttatatcggttctatctttatcgggtatttgattatttgttgagggattagtaaatatcgcatctttattagcctgtttatttaatgccaaattatataaataattaccagcataaaataaactaccaattccagctgccaacatagttaaactaccagttaatgcaattttcgtcttttttcccattactagaacagtgttccttgtttaccccaatttggatattcatcaaacgaaacataaacatcattaatttcaatatttgttgtttctttgatcatttttactaactcttcagtaaatttctttttagcatcaaaatcaattgtattatataatttaaccgcaatcatcatgcaaggaatgtcatcaccgcggaaatacataatttgattatcttctaaatgtaacattaaattttcttcttttttaccaggtaagattgtaatcagctccccagttcttttagcaatttcattttcttgcctaagtgttaatttatgatttgttgtaaatgaaataaatggcatatatttttcctccttatttttattaaggatattttaacactttttatagctaatgttaacaaattattagctatcttaatttgaagttaataaaatttattaaagcgtttacataaaggatttgatttctttttttgattatgttaaaatataagagcaaaagtagcaatataattttcaaagtatcacaagtattagaagattgtattacctttatgtaccgccgcaatccgatatttgtgatttagagttacatagagtatttcctttttgcacatctttcaaggaggtaccattaatgagtacaggtaaagtaaaatggtttaatcaagaaaaagggtttggatttattacaaatgatgaagatggaaaagatatcttcgttcatttctcagcaatcaacgctgaaggattcaaaactttagaagaaggtcaagttgttgaattcgatatcaacgaatctgatcgtggaccacaagctcaaaacgtaactgttaaagcttaataaccagaagaaacccggttaatcgggtttcttttttattcaattattccataatgaagcagagctttataaattcctccatcataaatatcacttgtaatatattcactagcttcttttgccacatcaacaccatttcccattgcaattggatgcccaactactttgaacatacacacatcattaaaaccatcaccaaaagcatagctattatcacgttctatttttaaaatcgtcaatagttttttaattccaattcctttatcataaccaataattgttgcatcagcagaattatgaccaaagtgctcatttaaaactactgtatcttgtaaataggaaacaatcttttgataatgttcttgatcattaaaatgaacatcaaacatgtgggcatcgatctcctctgttttaaaatcttcaataaaatatggatgttcgtaatctgtttgcatatcagctaacttattaaaatcaattccatgagcatagccaagattaacgccattaaaattatatccacattctaatttatcaaaactatccacaaaataactaacctgtttcctagtcaatggttcatccaataatacctcttctttatacacgatatatcgaccatttgcacaaataaaaccatcaacatatttttcaaaatgatattttgcgtaaatatatggtctaccggtacaaataaaaacgtaatgccctagattttgtaactttcttaaagcttcttttgtatcttcaggaataatattttttactgctaaagtcccatcaatatcaaaaaagaatatttttttactcataatagttcctccattacattattatacaataaaaataaagtagagttcaatgaactctactccataactcgaattgcatgatatccttcatgaattgctgttaaaatttttcttggtgcttttgcatcaccaatcactgtaacatcatcataaatttcctctaaagcatcttctaattgatcatttggtttaaatccagctgcattgataattgtatcacacacgattgtatactcctgattatcttggagatatgtaactcgattatcttcaattttagtaacagttgcttttgtaattttattaatattattatcttgaagcatttgtctcaacgcctgatcattatttaaacagtggtcacaaccaaataaaatatcttcctgcatttcaataatagttaccgtttccgcattttctttaagataacatgctgcctcacatcctgctagacccccaccaataattactatttgttttcctgcttctttacggtcagtcaaaaattcacttacaaaacctgctttttcaattcccggaattggtggcatcattggtgatgaccctgctgatagaataactttatcgtaatcttttttagcgtctttgagcgtaaactctgtatttaaataaacattcacaccagttttcaagcattgtctttcaagataagtaatcaatttcaagacatcatgcttaaaggtaggcattcctgccgcccaaagtgtaccccctaatcgttcttccttttcatataagtcgacttcatatccacgttttcttgctgtgatagcagcgtacattccacctggaccgcctccaataactagtactgattttttaattccatcaacttttggcagtgcgaattctttttccgcatagcaaagtggatttacagcacaataataatgttttccagaaaaacctgctaataaacattcattacagccaacgcatggtgcaatatccattgtatttccctgctttactttattagcccaatgtggatcagcaagcatttgatgacctaaaacaacataatccaaaactccttgtgctactacttcttgtgctttttttggatcaaataactttccttgccccaatactggcaatgatacattttctttaattgctttaactacatctaattggtgtccttcttcgttgtaaacagttgaaatagctttataccaagcctcataacatcctacatcaacatgtaatgcttcaatcccagcaccctcaagaattttagccatagcaattccttcatcaatttgtctaaatccctcaactttatgaaccggagtaaatttaactaaaattggaaaatccggtcctacatttgttctaatcgcggcaatacattcaagcgtaaaacgcattctattttctaatgaaccgccatattcatcagtacgtgtattccactgttttgaatgaaattgatctaataaatatccgccgtaagcatgtaattccaccgcatctgctcctgccatttttgctaaagaagcaccatatccaaccttttcaacgatatattttatatcttcttttgtaaatggcttacatttcaaatcaggaaaccaaaacgccccacaatcactagctgaatatggtggtgtaaatggatcagtaaattgttgtcttcccaatcctggtgatacttgaacacaaactttagcgccatagttatgacatctttctactaacatattcaaacgctcaacatgatgaaaattactaagttccgtacatggccgaggttcatatttagtggatacaacatttgcaccagttataattaagccggtacctccctttgccctttcagtaaaataattaattgcatcgatattatatgccccatctgcttcaccagttgttcccatcggtcccatcacgatccgattttttaatttcattttaccgatataacttttttcaaataatttattcataattctcctcctttacttcggtaatatttattttactcaagtaaagtataacataataatcataaatgtaaagggttacatttatgattacattacttgctttttttactagatgatttatacttaattattagaaatgaggaatacgatgacaaagattacaaaagatattattattgaaacagcttaccaactgtttttcaaacatggatataataatgttacaatcaacgatatttgtaaagaatgtaaaatcacaaaaccaactttttatacctatataaaatctaaagacgacattttagcacatttttatgatgacattacagaagcaatcgttgctaatacggctaatataatcatggcagaaaattattggcaacagttattgatctgttttgaaacattaatggaagaatcaataaaactcggctatgacttaagtagtcaaatgtttattatgaatttaaaagaagaccgtggtagttttgattttcgagatcatttgaccaatatcgctattgcaattataaaaaagggtcaagccaccaaacaaattagaaatcaaaacgatcctgaaatactatatcaagcttcagcatatgcatttacaggttatgaattaatgtggtgcataaaaaaaggtcagtttgactggaaaaaagaattaagaatagcattagaaaacatatatgatgttgcaccagaacttcgaggttaaatatgaaactatataataccataaaaattaacaatcacagctattatatcaatgatgaggatggtgactcttgttatctaataataggaaatacccatgctctattaattgatttaggcctatttaaagaaccatttttaccgacgattaaaaatattactaataaagaattaattatagtatgtactcatggtcactttgatcatattggcacaatcaaagaatttaaagaagaaactatctatttatctcatcgagaccgtgatatttattatgataatgctcatattattaaggaactttctttgattgacttcaaccaaatcaaagatttaaaaaatcatcagcaaattgagcttggtaactttgaaatagaagtccttgctcttcctggtcacaccccgggatcaatgatttttctaggccgtcaaaataagtgtatttacactggtgatgcaattggttccggctgtggtgtttggctacaattattccatagccttgatttaaaaacgtatcataccgctctccagcagactattgactatcttgaaaaacaaggagtagacgatacttggcatttttggggtggacacaatcaacaagaaattcagtcaaaaatttctgcatataataagttagattttgttttaatgaaagatcttgaacaactatgcctaaaattaataaacagtcagattactggtataaaaaactcagctccaacatttgatgacaaccaagcctactacgccagctatggtaaagctgagataatttatcaaaaaaatagtttatagtgaaattttcggatttcactttcttttttcattcgcattagagctattatctatgataaaataattccatatggaggtttaccaatgaaaacattacatggattagactatagtttaaaaataaaaaatacaattatcaatcacattaatcaagctcagaaaaatccttttataaattattattttattgttgacgatccattatattttgaagaagctttttttaaatatactgatacactttttaatattagaatcattacatacaatgatttgatcaaaaaattattagagcattatcaactatactcttatcaagaactatccaaattagataaaatcctaataacaaaacaacttattgaaaattctaataacttattcaatactaatagtaaaatggatttaatctatgaattgattgatattttcgatcttttctttcttgaaagttttagtaattcagagttagagcagctgccccccctagcgaaacaaaaaattgcaacaattatcggactctaccagcatctaactacttcattacctaataatacatgttacaaatatgaagaactattatttgaacaaattgataattctaatgttgaagatcattatatttttattagtgaacaaattttcaaacaacgtcgctttgaactaataaaaaaaatatcactttataatgatgtaacaattttggttaataatagtagcgattcacgtgatttgaataaaccttttaataaatatcatggtgatcaaaaaaacatctttgaaaatgataatccttatttgagccatctcaataaatacttattttcattacgatcaccaaagtatgaaaatcatacaccactacatacaattattcagactacaccaaaagctcaaattgaaagtgtagtattaaatatttatcaagatattgtagataatcacacgcactatcacgattatgctatctattaccccaaccaagaatatttaaccttattagttgatactctaaataattttaagattccccataatattaaaaaaagcttaatattcaaagaattggatgcttgtttattatggattagatactgtttaaatcatgataataatgatcttttagatttattggatactaaagttttaagtcgatataatgactttgactatcttgatttgattaagaaaaattatcttgaaaaaggttatattgaagatccctttagcaccctatataactttgaaaaagcgcaatcactagatgattattcatcagtaatgattaattttattaatcaagaaatgcttttttcacaaaatcagacaatgctaataaacttctttactaatttaacaagtccccagtcctttacacttgccgacttttatagtttagtaaaccaattaaaaccgtctttaaaagaagatatcaaaccatgtaatgatcatttatatttattaaattatcaacaatgttacagcggtatcttagaatgcaaaaaaatctatttggttggtgtcaatgaaactgttgttccaaaacaaaataaagatactggaatattactagatcaagactatcaaattctacaattacctgatttaaatcatcaaattagtgttgatcaaaataatattctaaaagtcttaaacagccaaactgaatttacagcaatatgttttagtaatggaacaattgatggtcaaccgctattaaaatcttctttgtacaaccaattaaaacaaatgtttaaaatttcaaatattgatataaataatgactattatcactatagcctgaaaaccaatttatatctacatggtggtaaggatattgaattatcatcactaaatacaatgattaagcactatatacaaactaataaccaaccagataaattaactgttccactattttcgaatcatctctcagcaagtaagctggaaacttacaatggttgcccatacaaatattttaatcaatatggattaaaattatacccttttaaacaaccgctttttcaaataaatgaaattggtacgatcatccattacgtacttgaaaaaactcaagccctctttactgacaatattactgctagtaaagctgaagtcgatgatttagaaacagttattaaccaacatgtcgagcaatatttaaatgaacatggtttaactgagcgcttaaattacggtactaataactatattattaaaacggtcaaacatgatctagttaatactgtaatcgttcttatcaaccaaatgaaagcatctgatttttatattgttggtagtgaagttgatatctatcggaattatcctgattttaaatttagcggtatagttgatcgagtagatcaatataatcaatatttaaagattattgattataagtcaagtaacaaagaccttgacctttctttggcaattcaaggttttaatattcaaatgctcttatatttagatactttaacaaaacaaaaaaaacttgataaaggtgctttgttatactttaatactaaaaaaagaatccttactagttctttaaaaatcaatgaatctgaacttagtgaaaactttttcaaattatatcgaatgaatggttatgttaatagtgaagtagtcgaagaagttgataacaatattgataaagattcagcaatcattaaagcaaaatttgttaaaaaggatgactgttacaaaggaaatattttaagtagtttctcttttgaacgtttaattgattatgttagtcaacatatcgaaaatttatatcatgaattagcaaacggaaatattggaattaatcctaaaggtagtgatgatgctacggtcttcactaaagttaatccatgtacttactgtaactatcgtagtctatgtaatttcgatgtcttctataatgaatatactttagttgacagtaataatttagaacacttgcttgaggaggataatagcgatgccaattaattctttaaatgatggtcagtatgaagctgtcgtaacccgcggatgttccattcttgtttcagctccagctggttcagggaaaactaaaattcttgttaatcgaatcatggctttaattgaagatgatggttataatgtcgatcaactgcttgtcttaacctttactaatgcagccgctcttgaaatgaaacaacgtcttcaagttgcattagatgaacgtcttcaagaagatatcaataagccattggaacaacatttattaaagcaaaagcaattattaccaaaagcttatattactaatttccatggtttttgcagtactcttttgaaacaatatggatatttgatcaaccttaatagtaaatttgatatttgcactgatccttcactcatcaaacaccaaattctcgataactgtattgaaacatgggcagaagatcaaacatttattgattttatcagtacttattttccagaatactattttaacaactttaagaacgctattttcaaatttgaaaatttaagcaatactatttatgactttgataattatattgatgcagtcaaaaaagatatttattatcacattattaacaacgatgatgatgctataaacaattggcctatcagtaataaaattatcgaactactacatcaacaagctactatgggattgaataaggtttatgaattagctagttatgccagttcccataatttgtctttttactatcaaaatccctttggtgataagcctaagaaagcagatttaccaagcccatatgattgtcatttaaaatattacttcgatgtcatcaaggcaatagaaagtaaaaacatgacgaatatcattaccgctagtaaagctagtttgatgaaaagttatgatagtagaggtttatttaatgaggataatgaactttataaaaaagaatataatcgtcttaaaaataatatcatcaaattttatcgcgataaatttaatgatatcgtatacgatgattttgatgagtttaaattaactttatcaacctctttagagcctttagaaaaattaattacttatttaaaacagtttaaacaggcctaccaagattataagctagctcataatcttttagatttcaatgatcttgaagctaatgcattagaattactagaacccaaatacggaattgttacacttctataccaacaattaaaagagatcatgatcgatgaataccaagatactaatcagattcaagaaactctaattaataaaattgcagatcttcatgaacccaagatcaatcgctttatggttggagatatgaaacaatcgatttatcgttttagagaggctgacccggaaatttttaatgagaaatatcttacttttaatctactacctaaaactaaacgtattgacttaaaatttaattaccgatcaaataaaattgtccttgacagtgtcaattatatttttaatcaaatcatggataaggatattggcggtcttgattattacttagatgaaagtgccaaattgaattatgattttttacgtaaagaaggtgcaaaagaattagaagatttgccagaagtcaccgccaaagcatcacaacgtcttgatgaagaagcacgctttactagcgaagtcatcctatcatatcaaactggtactataagcaatgatgctgaattagaagcaaaaattgttgctaaaaaaattcaggatatgattggtcacttagaattggataattttaacggcacaaaaagactggcagattataaagatattgttgttttaatgcgtagtactcgcagctttatagcttttaaaaagatatttaataaatttaatattcctagtcatattgttttatctcaaggttttttacaagctccagaaataattaatctcgttaatgttttaaaagcttttaataatcgccttgatgacattgcctttacaagtttactaaagggcaattatgtaataagtcattttagtgagaattttttagcgcaaattaaaattgatgaaactatctcaatgtttgataattgtattaattatcttgaaaaaaaattagataattatgaagctttagaaacatttataaattattatcaagatatgcgaaactattttaatagtcattctattaaagaaagtttgatgaaattccttgaggatagtaattatttacctttcttagcttcattagtcaatggtcctcaacgagttgcaaatattgaattaatgattcaaaagttagatgaaatgcatgatgattctttaaatacaataactactaaatttgatgatatgatcaataatggagtcaatctctctcccgcaatggtttcaagtaatgatgataatgttgtttcttttatgactatccataaatctaaaggattggagtttccaattgtttttgtttctaatatgcaaaataaatttaatcagcaagatgcccgagaacgaatcattagtgataaaaaattaggaattgcgatcaaaccgcgagtaaaatgtgatttagaaccctatcaagacgttattgttgaatacgaaaataaatatcgaaaagtaattgcaacagcacagactagtgaagcaatcaacgaagaaatgcgaattttttatgttgcattgactagagcttcacaaaaactaattatgactggcttaattaaggaaccccaagatcttatcaaatggcaaaaatatgtaattaataatagtgaagattcaatgataaatccacgttgtaaagataaagtaattctttatcataatgcacgtaagcaaaatagctatttagattggttaggaatttctttaatgagtcacagtaatattattaatcaaggtctaaaaaaagaactcctagaccatgatcaaacagatgatcttgttaatgaaataaaacaaaattttcaaactattttgattcatcaaaataagcatttaattcaagaaaatactaaacatagtaaattttctatcaagattcttagtcatcatgatgttgaagaacaaattatcgtttcaaataaaagtgatactattcttgacttaagcagttatcatcgatatagtaattttgaatatccatacccaactaacctagaaaaatccattgctgtaactcgtaaaattgaagatggcgatagaagttttaaggatataagttatgagcttgatgattccccagttgatgctggaacacgtggaacaattattcatagtgtgcttgaacatcttgatattgacgttcatttagatttatcagataacttaaataaactcaaacaagcaaacctttatgacaatgaagcctggcaattaattgataaatatcaacaacatcttgaaaactttattactagcccagtttatcagttaatggttaatgctgactatctttatcgtgaaaaagaattttctatgcttgaaaacggacaaattattcatggaatttttgatgttgtctgtattaaagataatcaaataacaattatcgattataagactgataatttgaataaaaacactagtaaagaaatactgatttctttacataagccgcaaatggattattacaaaaaaatattagctcgtgttttcccacaagctaatatccaggcaatcgtttattatctatatattaataaatatgtaactatttaaaaatgggttatccgtaacccatttttatttcacaacaatatctttaatattctttaagatgattcgcgtcataccgccctcatccatttccttgacgatatctacaccttcaagataatcctcaacatttaattcaataattcgatcatcatctaaaactaatttacaacgtgacatccgatctagcgatactggaacgttgacaatttcatcatcttcttcaattcccagatcgcgcataattaattcaacctcttcagttgcattatagtcgtttcccataacttttttagccaattccatcggttttaccggacgatgatccattactaaatcaacaagttctttttttactaatggtaggggatccccttcaacaacattatattcactgtcaactttctttacaactttattaacaatactcattttttgtttatctgttaattttggttcacctttaatatattgttcattcaagtaatatcctggtttcccatcaatcatataacgtttttcaataatcgacaaaatattatcttcaacattgataataattgcttcttcaacagctgttgttttatttggtaaaatttgttgattaataaatctaatactacgtataccatcattttcttcaattaaactcattggcatagttttatagtttaacttaataattaaaacaaatttcttaccatctacttttaattctacaaacattaaattagcatttggcatttcttcaatttttgtacataaatcaaataaatcttgcgttattttaatcgattcttctttaaacgcctcattactttcaatcatttttttaccagcttgtaataagtgatgctcactaccggttaccaattctttaattccagaattttctaaacatttttcaatttttttatcataatactcagttgttccttcagttaaattaataaatgtatctgagtaaataattttactatgttccaaatccaacatatgaatcaaaatcttatcaattataattgtattattcattctttcatcaccacggttaagtatatcatattttgttgaaatacgatataataatcttggtgattaaaatgaaaattattatcgcaccggcaaaggtgatgaaaacaaaacaagtaaatattgaaactacagatatcttatttaaagacaagactacacagctacataattatttaatgaaatttaatcttgatcaactccatgacataatgaaaatatcttttaaaatggcggatactgtctatagttatttccacaatgaatatactgcggttcctgcactatactgctatcaaggtactgtttttaaacagcttagtttgaaagactatgatgcagacgattttgtatacttagaacagtatttaaatattttatcggcttattatggcatcttgaaatacaatagtgcaataaccccatatcgtttagatatgattatgaagattgattttaatttatatcaattttggcaagatgaaattgataattattttaaaaatgaagactatattatttccctagcctctaaagaatttactaagatgctatcacatccccatatcataaacattgactttgttgaagataaagcaggtaaaatggtacgcaattcaatgtatgtcaaacaagctcggggaaaaatgcttgatttaatggttaaaaataagattagtgatcttgatagcttaaaacgtctaacgtttgatggctatatatatcatgaagaattatcaacagacgataattatgtttacattagaaatggaaaacaaacatataaaaagctataataaaaatagatggcgtgccatctatttttatttatttaaatattcttctaagaaatttatcattctttccatttcttcatctgtcccgatactaattcttaagtattgatcaattcgcttagtattccaatgacgaacgattattcctacttgccgcaatgctgtaaataattcttggccttcaacatcaggatgttttacaaaaacaaaatttgcataactgtcaggtacaataaaacctaattcttttaatcttgttttagtcatttctcttgttttaattactttagcacactttgcttttgtatcttgatcgtcaaggatactcgctaaacaaatttgttgtgcgacataatcaactggataagaattaaatgaattcttaacatcatacaaatgtctgattgcctctttacttcctaaagctattcctagtctaattccagctaaagaacgtgatttagaatatgtttgtgttacaactagattatcatatttatcaattaaagagacacaactagttccaccaaaatcaatatacgcttcatcaatgactacaatactgtcagggttattttttaatattgtttctataaaatctaaatcaactaacaaaccagttggtgcattaggatttggaaaaataattccactattaggctgcataaaatcattaagattaattttgaaatcacggtctaatttaaccagtttatatgccatttgatataattcacaatataccggataaaaagaatatgtaatatccgggaataaaattggttcctttccattaaagaacgttaaaaaaatcaacgcaagtacctcatcagaaccattccccaaaaatacttgttcttcttcaagtccataataattagctaattctttacgtaaatcaacagcatcactgtttggatataaccttaaacgatcaatatccaaagatgttaatacttccttaattttaggactaggtccataaggattctcatttgtatttaacttgatcatattcacaattttaggctgttcccctgctacatatggttcaacctcgcgcaatttatcttgccaactcatataattcccccttatttaagcatttcatcaatcaactccgataaataatcgacttgtttatcactatgctttttaatcagttcatccgctcgattaaaagtgtaaccatgatccgcgtgctcaaacatactaatatcgttatacgagtccccaatcgcataacttacaacatcttcattaagtaaactaactagattgctgattccagttcctttcgtacatccacttggcgtaatgtctaaataatgcatatttaatgtaccatgcgcttcatctgcataatgttcatctatatatttttgaatctttaaaacttcatcaatctgctggttgtcttgatttatcgctattatatcaaactcctcaacatttggatactcttttataaaatcatgctcattcgttacaatactacgtcctacctcatcataaatatatgtttgacctctcaaataccctaatgtcttttttccatcataaaaatatatccacatatcatcatatttcaaacaatgttctatgatatcaataccagcttgttttgaaataactcgtttaaataattcttgatcattacgatcaacaatatgagctccattatttaaaactaaatagtcataatataaatctaatttgtttgtactgcgtaatgcttcttcataatttctcccagtattaaaagcaaacaagtgcccagcctggtgaagcttttccactttctctttatccgggggatataataacccatctaaatcaataattgttccgtccatatcacaaaatagtatttttttcataaaatcctccaatatatagccatattataacagtttagactaaatcatcaaagagctgataaagcatttgattacttttatttacttcttgtaacgctgtttcaatatctttcgccacaatttttccatcttgcaggcatacacacttaccgctttgattatcttgaagaagttctatcgctttatttgccatccttgcagctaatatccgatcttccggcaccggtgagccgcctcgttgaatatgccctaaaacaatcgagcgacctgaaaatcctgtttcttcactgattcgttgtgctagcttttcaacatctaaaattttttcacttgcaattacaattgcatggcgtttattataaacaatttcattcttaatcaactctttgattacatgctcttcatcatagcctgtcttattagtgataacaagttcacttccacaagatatagctgcataaagagctaaattatctgcattgttacccattacttcaactacaaaacaacgatgatgagaacttgaagtatcacgtaatttatttactgcatcaataatattacataatgcagtatgaaaaccaatcgtttcatcagtaccattgatatcattatcaatagttccaggtattccaatacaatttatacctttttttgctaacgcttgtgccccacggtaactaccatcacctcctattacaacaagactatctatttcatgttcttttaaattgtttattgctttatcttgaacttcatctaaagtaaactccggtagacgtgatgattctaaaatagtacctccttttgcaagaatttcagaaacatctcgatagcctaagcgtgctattttaccctctactaatcctcgatagccttcatatactccataaacttcaaatccatgttttattcctactctgacaattgctctgattgctccattcattccaggagcatcaccgccagaagttaatactgcgatttttttcattttttcacctcatttaactttctcttctaaccaattttgataaaactctagttgattctttagatgaaaaaagtgttccccattttccatgatttttaaatcacaattaaaatgactggcaaatttctttatatattcatattcacataaattgtcattttcaccatacaaaatcattgtttgactattccattcggtgactgaatgttctttaacatagcaataatagtcataatacaatgtttccccaataggtgtttcaatcattttttgttcttttaatttttcttcatttatttcaaaccaaatcatcatattttcaattaaacgttgcatatcaacaactggtgataaaaataaacactgattaaatttaacacattgataagctaataaactaaaaaatgctcctaagctacaggcccataaacttatcttttcatattttcctttaacatagtcatatatctttaataattcctctgtacaattttgtgcattacacaaagtatcttcatatactcgatccccatgttttggcaaatcaaaactaactatttgatatcctctatttactgctgtctttgctagcatttctataacaatatcttctttattagatttattcccatgaactgcaagaaaaacttttgaactccctgctcaccagataactgcagggatattatcaatttttaaatatttctttttcatcttcccaccacttccttatcaataattataacatagtccaaatttaatatttagcttttgcaaaaaataatactacaacagtttatgttgcagccttgtctttggctggtggttggtagcacgaaacctccacagcgggctttcatcacctagttttatgtcgtgcgcagcacagcaaaaaaggaactgattattcagttcctttactattacccactaatttattcatatcagctttagttttatatgtgatttttaatcgataaccatcttcgcttgaaagaattctcattgacacttttgtatcatcttctgattgagtgattcctattccataattaccaatactttcatttcgttcattaaaatcattttctaattgattaaacttctctccagctttattaaaacttacatacatatcatcaccgttaatcaatttaacaatttcttttaacatcggataactttgctcgttgattttcatagcttcaaaatctttaaagccgttaatagtataacctatattaacagcattagttgttcctgataagtcatatgaaaaactaattgacattgtttcatttttaccaatctttaaatcataattcagacttgtataaacattattttgatcagttacataaaaatcataatctttatcaatcgttgttttaccatacttatcagtaattgcagttaaatcattttctaactgcttgatcttcttaacataactatcactattagttactagtttatcaaaatcttttaaactcccaaactgatattctgttacctctttattaatattaacctcacctagtggacctagtgtaattgctttatccggtgtagtaacagtattacttgcagttccgtcacctaaaaaattaccaaataacattgatgaaatcagcggtgagaaaatcaatactaaagctaaaataccgtataaataattaggaaatgtatttgttcttttcatgggttgatagcctttttctaagcgtgtaccacaatgaggacaaactttggcactatcaggaatattttttttacaatgtggacattgtttcatgcaatcacctactcatatatatttgccatccaggtcttaaagtcttccacaaatttttcttttgcctgggctttttttgtatcatcttttatttcataatactcttcacttagataagtatactcgctaattgtttcacctttattaactaattttaaaattggtgtccaattaaaatctaactcttcacgaatatttttataaaaatcaatttctttttcagatgccccctcttgcatggcggcatcacgaaatgcctgaatatttaaataatataaataagtacccttattttcctctaaatacgatgttaaaatcggatgaaactctttacaatctccgcaatcaggacgaccaatatataaaacaaaagtatcatcactagataatttgttttctaattcatcataagtaatttcatgaagacctgataaactattgtctttttttatacgattaatggatgcgtcttggcatccactaatcattaatacacatacaattaaacttaataattttttcattatttaagtaaagattctccatccatttcagctggaatttcaagtcctaataattgtaaaatcgtaggcgctaaatctcctaattttccaccctcttttaattctaaatgagaatttgttacaattaaaggcacttcatttgtagtatgcgctgtaaatgggttattatcttcatctaacaacatttcactattaccgtggtcagcagtaattaacattgttccacctaattcaagaactttattgtatacttcacctacacattcatcaacaacactcacagctttaattgctgctggtataattcctgtatgtccaaccatatcgcagtttgcaaagttaacaataacaacatcgtgaatatctttatctaattcttcaattaatttatcttttacttcatatgctgacatttctggttgtaaatcataagtagctacttttggtgaatttactaacactcgagtagcaccttcaatttccttatcaacaccaccgtcaaagaagaaagtaacatgagcatatttttcagtttctgcaattcttaattgtttcataccttttgcagataaataatcaccaagtgtattagttaaacttggtaaagcaaaagcaatcgcaccattaacactatctgcatatttcatcatacaaacaaatgttaaattttttggcacattattaaatgcatggtcatagaatccatcattagtcatcactgttgctaattgaatcgcacggtcaggtctaaagtttgcaaagataactgaatcaccatcagctacttgtccatcaacatttttattatatccaggaattacaaattcatcataagtttctttagcatatgaatctttaacatattgaacaggacattcaaagctttcacctttatgattaacgatagcatcaaacgctaattcaacacgatcaaacctcttatcacgatccattgcgtaatatctaccagatacagttgcaatttcaccaacacctatttcttcaattttatctgctaattctttaacaaaatcagcaccactatcaggagcaacgtcacgaccatctaaaaatgcgtgtacatatactttttctaaaccttcttgtttagctaattttaataaggcatagatatgttcatttgaagaatgcactccaccatttgataataatccccaaatatgtaatttagtattattttctttggcattattaattgcttttaagaattcagcattcttatagaatgttccatcttcaacagctttattgattaaagttaatgattggtaaactgttcttccagctccaatatttaaatgtccaacttcactattacccatttgtccatcaggtaatccgacaggcattccagaagctttaattcttgttgttggataaatcatttctaaatcatctatatttggtgtatttgcaagtttaactgcatttccatcaattctttcacttaatccgtatccatctaaaatacataatacaattggtctttttttcattatctaattcctccattttcatgaaccattataacttgtttaactacaataatcaaacaagaaatacttgaaataatctaaatttaataactttttactaacaaaatctcttcagttaaaatagttttatatttctataatatattgatatataaataatatagttatataattataatataaataataaaggggaaatgctatgaaaaaattattatgtttattactcgtttttatgctgtgtggttgtagtattgataaaagagcaactactaaaactgttgatgtcagtccatatctctataaaattagtgacaataataatcactatctttatctattaggaacctgtcatcctggtcgtgatcaaattgataaacttgatataactaccgaaaaagcaatcaaggatagtcaaagtattgttttagaatgttcattagatcaaaatgaaactgctaaatatcaaaattatcttttagaaaacagtttaggtgaactagatttgattaactatattcctaaattaaaagaaaactatcctacactaaaaaaataccgtgttaatgaatttaatgctatggcagtaagttctttagtaacctctgatattctagacgaagtagatggcaataatagcacttccattgatgcttacctttttaatctcaccagaagtaaaaagattccttttgaagaaatggaaggaattgaatttcagatgcaattattttcacaattatctaaagaatcacctcacgcaattttagaatccttaaaagatcgacaacaattaatcaaaagtacaaaattgatccttgacagttattataatcatgatcttgatacattagcgacaatatacagctatcaagaactaccagatagtgaatatcaacaagaatatcaaaattatcaacaattattaataattgaccgtaaccaaactatgcaagctaaaataatagaatatttaaatcaaaataaagtcgttttcatcggcgttggtgtaggtcatgttgttggtgatttaggattaataacatcgttaagcgcagccggttataaagtagaaaaattaggttaaaaaataaaggtctagaatttatctaggcctcattttttctttttctttggcgaacttaaaatgtacattccaataaaacagagaatcaaaggccagtagccttttatatagtatgcaatcgttgatactattccttgaaagtctttagttcgatccatggttaaaatcattcctaaaataattaatacaattcccgcattctttctaaagtccattttaatcacccccattatcatagcaagggcaatcaaatgaatttgtcgattagaggatagaacgtgcaaaccgtaataaattatttaaatctacaggttctttacctttttgtgaatatacataaattctatcatgatcatgatattcaaatttattagaatgaataatactattaatatcccgacgtatgtcctcatcaatatgaataaacaagttttcagacatttttctaagtaaaatgcataaacttgctaacgctaattctaaatcaaaatatgctctaattaaatctttttggataacatgttcatcaaagataccttcttttatttcaactttttcaatatgattcaaaacggcatcgacactatttaactcatcttcaagcatatccaagtaacattcttctttaatttctcttttgttcatctacaagcttatccttttccttaatcatttgtttcaattcttttgcatataacacaaatgacaataacattaatgcactgctagtgataatcattaactgactagcaaaagtatcaggaatgtgatacccaataagaattattacaacaaaataaaaataagctgttgcaattttcccccaccatgaagctccttttatttttaagccataatcatataaatataatccaacaattcctaacattccatctttcaatacaattattattaataacacccaagctaagggatatgtaaataacaaagtaatcgcaattgtaaattgtgttaatttatcagcaatcggatcaattaattttccaaaatctgtaatcatattatattttcttgcaatataaccatctaaacaatcactaatacctgaaagcacaagaataaatgctgcaataatataatgatgttgccattgtgcattaaaatacacaaataaaaatactggtattaataaaattctaaaataacataagcaatttggtatattaaacaactttgttttatctttcatattcatcttctatccctctttttacataattatagttaacttattaaataagtcaatgatagaagatttaaagtatctttttcattgtaacatgcgggcaccactcatcataatacatatctccatcaggtttatatcctaatttttcataaaatttctgagcctgctgttgagctgacaactcagtttcaagacagcctaattctctagctttgttctctaaagcagtgacaaccttacttcctaatttttgcccacgatattctttgagcgctgcaattcttcctaagatcattgttgtcttatctttaaaatacattcgtccaaccgcaatcggctgctcatccttataaatcaccagatgatacgcagtattgtcaagcttatcaaactccttttcaaagccttgttcttcaacaaatacagcttggcgaattaaagctgcatctttaaaagatgttttaccataactaaatttaaaatccaacttagattctatcatcattaataatgtatcaacttctataacttgagcaaatcgattcttccaaatcttttcttctaaatattgctttaacacttttccacttattatatcattgtcaaaagtcgttgtagcatcttttggaacaataactctatatcctaattcaaatgctactttaatactagtatcaatacaatattcactttgcataccaacgatgatcagatcttgaattccctgtgattttaaatatgcatctaaatttgtatttttaaatgcactattatattccttttcaaaaattttatcatcttgtctcggagtaatccgtgaatctatttgccaaccatcactatttaaaatcaattcctcatcatgatgacgaacatagacgatttcgagatgttgattatgacataccctgattagttttcgaatatgctcgatcatcttattttcatctactggatactggctcgtcaaagcagtttgaacatcaattattaataaacatcttttacgcatcattttcctccattgcatcaactaaaaaagtcgtaatcgttgaatacacagtttccttatatttttcattgagaatttcatggcgcatatgctcaaataaaattgaaatcacatgttgatagccttgtttttttaaatgagttacagcattattaaatgctttttcattaatcaagcaaggatcttctttgccagaaataaataagactggtagttttttatttgcttcataatctatatttttatatgtattttgcattaaacttaataaattataaaatccatttacactaaatgtgaaggtacacagcggattattattatattcatcaactacttggctgttactgcaaatccattcatttggcttatcaaagcccttattaaaagcaccaaaagacattttctgtaatagtttactatgatacttatcccccttgaccattgctatcgctttgcataatagctttcctaatccggctaatttatttttacttgggctgccacaaactattaatgcattaatttcatgatcatacttttgaatataatttcttacaactaaagaacccattgaatgcccaaataaacaaactggtaaatttggatattttttcttaatataattagttaattggtgaacatcttcaacgattgcacgggcaccttcaccataaaaataacccaaatcagtttcatctaaaacactttttccgtgtccacgatgatcatgtatgataacaacatatccacagtcatttaaatattcaataaaatctaaataacgctctttatgctcacacataccatgaacaatctgaaaaattgcttttgggtgttccggcgctgaaacaattacgtctaaaggtaatttatcagatattgaattaatttttagatactccatcgtttttctccttttcatgattatatcatattgattgcttgaataaactaaacaaactcttatttttatctaaataaacaaaaacctgcaaattatgcaggtaatcatttttgttcaattgtattttcagtaataactaacttccgcttctttagaatcatattaattacttcactggctaatgaatataaacaagcagcactaggaaccgcaatgaccattccaaatacaccaaataaatcaccgaaaacaaaaattgataataaaacccaaattccaggtaggccaactgagtttccaacaacacgcggataaatgaagttatcttctaactgtgataaaatctgaaaatataccataaaccaaattgccatcaaagcatcttttgataaaattaagactgcacctacaaacattgcggcaattggaccaaaaaatggaacaaatgaaaatattgaaataattgtagcaatcaattcagggtatggaaaattaaacagcttcatagttacatagtacaacacccataaaatacaagcttcaaccaattgaccactgataaaatttgaaaaaacttcattagttttatgtgcataatcaaaaattacacaagtaactttataaccacaaagtgctccaattgcttttcttaattgtcgtaaaaaagtttccttatttccaagcaaatatagagaaaaaataaatcctgtaaatactactccaaatgtagataaaaaatttgttgcattattcatgattcccccagcacttctagttaggatatctagtgcttgaccaaccatatcttgccaaggcatattgattaaatctttaacactagcaatattttccattctaaaatcaatattgaaatagataaatatatcatcgatattattaaatactgatgttagaaaagcagaagtattactgatcaatgaaattaaactgcttattaaatttggaattacgatactagcaatcaaaacaattaaacaaataaatagtatcagtgttgcaattattgataaacctcttttttttcgatataaaaaactagtttttgtacaatattttgtaatttgtttttcaatcagcttcataggctgattaagaatatatgcaataataatcccataaaacaaatataccagcgtccctaacaacgtgctgatcattccataaatattacctaaattcataagtaaatatatcaaaaaaactgtaaacgctgaaattatcaatccaggtttaacatgacgtttcaaatcatcatctaaattaaaattacgcatctaatcactccttattccgcttgattataacatatttatcatacattttataaccattcgtgatatttatttagataaacacgtttaactactgttgtcaatgcaatatataaaataacaattattattaataatccaaaataataagctggcaaactagtaagcccaattgctttagctaagtgactaaatggaataagcgttaaaacaaatgcagataataatgtaaaaatcgttacaaatagggcaggtttactttgaataaatggtacttttgctgttctaattaaatgaataacaagaatttggctccacattgattcaataaaccagcccgtttgaaaaactgcaatgaaataatcaggatttgttaatgattgataacttcctccagccattattggggctataaaataaaacatcaatacatatgtcataatatcaaaaattgaactaattggtcccatccataacataaatcttccaattgatgatgcttcccatgttcgagggatttttaaatactcctcgtcaacacggtcaaacggtaaggttatacaagcaatatcatagattaaatttagcaacaataactgaattggtgccattggtaaaaatggtaaaaatgcacttgcaattaaaactgaaaacatattaccaaaattagaactggccgtcatttttatatatttaatcatattagcataaactttgcggccttcaaccaatcctttttcaagaaccattaagtctttgtctaataaaattacatcagctgcttctttagcaatatctactccactatcaacagaaattcctacatcgcttgcctttagagctaatgcgtcattaataccatcgcccatatatccaacgctatgtccattttcttttaaaactttaataatcagtgccttttgttccggtgataattttgcaaaaattgttgttgtttctacaacttccttcagtttatccaagcccatctttgcaacatcttggcctaataaaatattttcaacattcaatcctaccttttgacaaattgctttagttactttttcattatctcctgtcaaaatttttgttgctacaccatgttccttcaatgcttttatcgctggggctgttgattcttttgcagggtctagaaaagctaaatatccaattaaaaccatatctttttcatcactaacggtacatttttgtactaaatcctgatctgttttttgactcactcccaagacccgtaaacctttttcattaagttgttcaacttgattgataattattttctctaatttttgtgttaacggccaaactttaccaagatactcaacatatctacaaacactgagcatttcttcaattgctccttttgtaaccatctgtactttaccatcttgatcctgaataataacagacattcttcgtcgttgaaaatcaaatggaatctcatcaattttttcatatttgtttgttaaatcttttaagctcgaatcattatcttgttcagccaacgtactattaataattgctttatccattagattatttaatcctgtttgataataactattcaaaaatgcatgtcgcaaaactcttaaatcaattttcccgtgaacatctaaaggaaattctaaaattacttcatcttgtgttaaagttcctgttttgtctgtgcaaagaatatcaatagcaccaagattttgaattgaatttaaatttttaattatagttttttccttagccattgcaagagagcctttagcaagactagttgtgacaatcatcggaagcatttcaggtgtcaaacctacagcaacacttaatgcaaataaacttgcatctaaccaatctccattagtaaatccattaataaataaaacaacaggtaccataactaacataaaacgaatcaaaagccacgatacagaattaattccaatttcaaaagttgttaattctctctttttatttaaatcaacagaaattcttcccagcatagtttcatcacctgtcgcaattaccacaccgacagcacttccgctaattacatcacttcccataaaagccagattttgtgcttcaagcacattcgtccctacagttgtttcaattgcgaatttttcaactggttcactttcacctgttaaacttgcttggctaataaataaatctttagcttcaataattctcaaatctccaggaatcatatctcctgcgctcaaatatacaatatcaccaacaactacttcatcaattggaatctcttttgcttcttgtccatatcgtttaatatttgtagtatttgaaatcattgcaatcagcttctctgctgcactcccacttctttgttcttgaataaagcgtaatattccagatatcattaccataactacaataatgattactgtagttggatccttttcactagtttctgcaaaaatcacattagtaaataaagatactactgctagtattaataaaattgcagtaaatggatttataaaagcgttaaatattttttttaatatagaatcttttttttgtttagtaataatatttttaccaaattcatcactatgatgtttgactgtttcattcgtgattcccattttatttgtttcaaaactatctaaaacttgattagttttattctcactcgcaaaaactaatctctcattaattgaattaaattttctcattgttataccctccaaattaaattttagagtatgacaaaactatcctaaagaatggcatcgccattattcgggacttataaacatcattgtcataccggccatgctcttccattctttttctcctttcaaaattttagatatagaaaaagccatcattaagatggctaggcgaaaatggacgtaattatcccatcatcaaaaagccatcttttaaaattcatcgataaataatcatccattttcttcacctccacaaaataaaagcctcatcgctcaaacgcgacaaggcatgaaaataactttatctcgttcaagcttcaacatcatagggccatgtaattgcattagtttttgccttcacgacaagaactgttgaccagcgcacagtgtctccactgctttgcggtagcaacccgtatccctatggtagtctcacctaccgattcttttatcgcttatagtttaacactattaaagataatgtcaacccctattccccttcaactagctctactaggatttctactaattcttgacttacaacctcataatcatcaccgtgataactaaaattgacttcatcacgacttgtagtggagtctgtatgccaatctttacatgagctatgaagctgcttaattcctgtataatcaagcatttttttcgcatttcctgcatttattccacttcccgctaagatttcaatattctcaccatatgcatcatacaaatatttaatcatttcttttcctcgagttgctttaccttgtaagccactcgttaaaatacggtctacccctaaagtaatcaaaatgttcattgcctcgtcaatatcattaacacaatcaatagcacgatgaaatactgcggttttgtgatatgatttaataatatcgatcatttctcgggtttgtggaatattaatatctccttcttcatcaaggcatccaaatgcaatcccatctgcaccattatcaagtaatatttccgcatccagtttcattacctcaaaatcttcatcattgtaacaaaaaccagcaccacgaggtctaaccatacaaataacttctaaatctgtgttatctttaacttttaataaagttgctaatgatggagttaagccacctaagtgtaatgcactattcaattctattcttctagctccaccgtattgtgcctgtaatgcatcataataactcccacaacatacttctacaattttatccattttatcaactccttacttgtatatttattataacacttttccaaaagcattaattgttatttttaagtaaaagttggtttgcattttgttaatagtaatggtaaaatttatgagcatagtttatttgcaataaataaaaattgtaatataataagctagttctgtccccttagtaaaatggatattacaagaccctcctaaggtttaggtgcaggttcgattcctgcaggggacgccaattataatttataaaaatatattattgaaatcaggtggattatagacctcttaaatccaccttttttatatgaatatttaactttttataatctaacagaacacatacttactatttctttcaaagatacctatacaaaaataggattttcataagcacttttgacataacatattactctagttcaaaagcatcagtatagagactataataaacatcatgctttgaaatgagttcatcatgactcccccattcaataattttcccaaaattcaaaacaataatagtttcagaattacaaaccgttgataatcaatgagcaattacataggttgttctacctctcattaaattatccattccttgctgaacaagcacttctgtcctaatatcaatcgaagaagttgattcatctaagatcataactggtaaatttgcaacagccgcacaagcgatagaaagcaattgcctttgtcttcgagataaacttgccccattttgcatctcatagataggttcccttccattttttaaagaaccttctcatctgaaacttcaatgattcgttcacatgatgctcttgccatattgatcattaccaatacttgtaataacatcatcagacaattcaaaatattcattgtataggcaatcatacttgataagtcccctgtggtcagcgttgatgcatttataagaataataatttttgctccaaactagcaaagaaacaacaaacagccataaactgcattataggcatataaatgatttaactacccgaattcctgccaaattttcctgtactacactattcaattcatcatagatatgaaataccttttcaaaatatggatgtaaacgactaacaataaaataaagacctgcctctaaaactggaactgcaattaaaaatattaatgataaatccctatttatcattaatgaaacagctagtgaaaatgccagcatgatggtgctcgcactgccacacgaatagtcatcatatgtgcattttgaacgttagttacatcagtcgctaatcttgttaccaaacttgaagtagaaaacttatcaatatttgcaaaagaatattcatgaattttataatacatattctgtcttagattttgagcaaatccagctgaagctatcgcacaaaaacttcctgataacatgccacaaataactcctaaagtaacacaaaagattaagactacaccccatttgccaaaaatactatatttacaagtcaggaagaatatttcatgaatactcaacaattagaatgttttgtgcgaatagcagataaattgaattttacaaaggttgctgaagaattatatattactgctccagcagttgtccatcatatcataaatttagaagaattaaatacgtcattatttatcagaacttccaaaatggtaaaatcaactgagccaggctcattattctatagtgaagcaaaagatattctccaaaaaatatatatggttgagaaaaaagttaaaaaactagccagtcaaaaactttcgatattacgaattggctgttctagtcaagtagaacttgagatattagaaataccattaataaaattaagagaagaatttccaactgtttatccccagattattattcaggattattttattctaaaatctctatttgataataaacaattagacattttagtcagtacaaaagagatggattgctgaggctcacgattatatatttaaaaaaataaaaaacatttccagttatgcaatcatagctgaaaattccccgtttgctaaagaaaaagaaatatgttttatagatttatatgatacaccacttactactttgcatccccgctttatcccattttaatactgagataaattacaagaatttattgctctccatgaaaaaatcattttcatcttttatgtaaaaatgaccaggctgctattcttttcgctaaatgtaattacggtgtagctattttaccagaaatatatattccaacacatattaaaagaattgtcgctttaccatttatggatgatcaaatgacaatagaatatggaataacttatcacaaaaatctaaaagaaaaatatattaaggaatttacaaactattttataactaataaataataaaagaagatttaatttcattgatataatcaattattttaaatcttccctttaattaaaaatattttataacttatcttgattatttgtcatttaattacatgatagataagcttaacatcattatacaatagatgccctatatatttgaagaatcacattctccaaacaagtattgaactcaacactagtctgatttattgataaatcagataataatgctctagaaaaactcgcaataagcccgtgattttcccttaataacccatttgcctgctctctatcataaccgccagatagagcaacaaccctaactacatgggaatctttcataagttccgcgtaaaaatcaggtacggttggaatggacagtttaaatataaatttaacatcattgtctaataaagttagatgctcattaatttctttcaataacaattcttcagcctctttttttgaggtacttaaaatagatacctctggctctaaaataggtacaagcccagttttagcaatttgtaatcctaattcaaactgctgatcaacaattttcttgatacctgctggatcggcttccaaaattacactacgcatttttgtaccaaagatatatttatctcttgccttgtttaatattgcttccagttcaggaattggcttcattaactgaacaccatctttttctacttctaatcctttgtcaattttcaaaaatggcacgatttccttctttaaccataaatattcagcagtatctacaccctcaatttgagaatccattgtcttttcaaacaaaatagcacctaatatatgcttagaggtaaaagccttactagtaataatacgactacgcatttgatgaattaaatcaaacatttctttatcattactatacgctgattcatcaataccatatgattttaatgcctttggtgtacttccaccactttgatctaacgctgcgataaaaccttttccatattgcatacgctctaattgttttgtgttcatttaagagcacctccttttcctgcccttattataccccttgtccatcaagtattcgaataatacgttctattttgttagataagaataactatttttacaaataagaatcgcttttaaaaatatgatagattattttaaaatatgctataattaaataagataatctttatacataaggagataattaatatgtctatcacagtaaacatttattacactggaataaacggaaatgctagaaaatttgcagaagaaatggtgaccagcggtattgttgatgctattaaagcagaaaaaggaaatgaaagatatgagtatttcttttccatgaatgatccagaaaccatacttttaattgatagttggaaagatcaaaaatcaattgatgctcatcatgctactataatgatggagcaaattacagaattaagaaataaatatgatcttcatatgaaggtagaacgctatacttctaatgaagaaaacataacttctgctgacaaaaaatttattcgattgtaatctaaattaataaaacccattataaagtcaatattataatgggttttatactattcatatcaaaacatatttctggtaattgaaatatttattccttatttaccattttagttataatttatcctgtcacaattatcgttctttattaccaagtaaatatagcttttaattataaatatataattctaataaaaaaacattgcctatttaacattaccgctgttaattccttcttcataaggatccaaaggtaaccattctaatacatcttgaatatatttattccaaaaatcccaattatgacttcctacatcctctttataaactaaatcaaaaccagcattttctaaatagcctttaaattttcgatttactccaattagttcatcatcacatccacaagccatatatatcttaggaaaaacaatagtattgtcttctttttttgcctgaattaaattttccaaacaaacttttggattcttatcactcagatatgcttcatcaatatcaccaaaacaactatcttcacccattacacatcttgattcatcgtgaactggtaattcgaaaatatttagagcacttgataaagctgcaatatatccaaaattttgataatatttcaacccatttcttagagcaccaaatccacccattgaaagtccggcaataaaagtatcatcccgacgattagataaatgaaacatccttctagtaacttcaataagttcagttccaataaatataccgaagtcattgttctttacttcttgatccacataaaaagaattatcaccagatggcatgactacaactaagttctttgcttctgcccattcttgtattcttgttcgtgttacccagtcagtataatttcctaataaaccatgtaataaatataaagttttatattctttaactggttgacaatttcctttaaaaagaaatttatcaaccggtaatattacattcattgaaactgttctttttaaactttgagaaataaaatttacttgtactaatgccataataaaacacccctttactctttttaaatctcatcaattgacatatctgttttataattatttaaaacgtaatcataaatataagcaatttcactaattggtattgttatattatactgattagcaatcgctttaaagctaattctaactccattgataaattcttgattatttttttcaaaatcaacaatattaatatgtgaaactatctcttctttttttattagacgttcaatcaaacaacaaagatgaatattcaaaccaataatagtttttgctaaaaaagtttgatgtaactgtatttgtaattcatcaatcatcattccaacagcattaagagctttatcagcatttaaaatcgttaattccccaactacattttgtagagaaaaatttttcattaactgtttttcaaatttttgataatcctcatttgaaaaaaagcttgataatttttcttggattaaatctaaattattaaatgtaacaatatcctcaattgcaattatacttttaaaatcgattcctaaatttatagtcgtagcaatgaataatatttgatttttatcaaattcaccttgattatataaattgataaatgctaaagaatcaaaacatttcacttcaacttctataactttaggcatacttttcataaataattgagctacttgtgccgcaatgtcactaccaatttcactaacaaaaataattaaatatttggcttcctttttttcaaaaaatttatatgttattattgtttgttcttgtaccaatcttaaaatatcacgacaattattctctttaattatttcattgcctactgccaaggccagatttgttgaaacattattaatgattcctaaatttacattagggatatccttcatatattgcataatattttctaatgaaccaaggtcaactaataataaaatatcacgatcattattataataaattatttttttaaagtgattacaaacttctctaattgacatcgtatatggcatatctatggcattaaaaacatgtctttttaacattttattacatacgtccgcaattgaactagcggtcgcatagccatgacaaattattgttgcaaaaatcggtaatttttgtttggtatattctatcgtagtaaataaaatacaaatcaacagacattcaaatggtaataatttaacttctaaattattatagatcaaagctaccaagtctttcattacattatattcaaataatgattttttacttattaattcaagcgtagtttcaatagtaacatgataggcatctttccaatgtgaaatttcattagaaaattctgcatgataatagatccatctggttacaaagaaaacaaaatttctaggcatatttatattataaatatcaccaatatcatcaaacagtctaattaatatatgttcaatatattttaatttaacatctttttgattttttttaaaaataattaaatcatcataatcattaatatgctgatatgcagcttgtaaaaaatatgtataacttaaattattttttaagtaattatttgccaattctactatatttttacataatattttttcatcaccaaacattatattattttttatttcatttatactaagaaatctagtctcatctttgtggttcaatgaggcattttttaaaatataatctggtaaagaaaatactgtaattttcaaacagttttcttgttttgctaatggatatctttgaatacatattgattgaatacattcttttagaccttgtatatttgtcttaaaatcgtatgtacacaaaatatgtaaagttcgctcagtaattttaatatgttttttgattcgtttttcttcattttcaaaaaaactggcaacaagatgttctttttcctgaattgaccgggaggaaaaattaggaatcatacactcaattaaagtatcctttattgaactcaaaatctttatttcttttgtactagaaataaccattcttaaatcaaccgtattattcttttttatttcattaatagctgtagtttgtatagtttctgacaaatattcaaaattttttaaataaagaaaatcattactattacattttagaattatttccttaatcatattacattggatttcatgactatatttatttatttctaaaccatccaactcataaaataagttatctttactaattaaattttcatattttgcttgtaaataacataattgtgcaatatatgaacgtcctgaaccataatcaccgattaataataatggtgaaccaaacggaggataattaatggcagctatacatttttccacaaccttctttaaactagaattaaaaccaattaattgtttaaatacattttccttttttaattctttttccaaaagtactatcaattcttgcaaatcataaaattcattttgaatattttgtaatttaaaagattctaataatacttgtttatcaaagaaatatgcaggtcttgaatttattttaactaattttccttctttaaaaaactcattaagataatggctagttaaattacgactcagcaataattgcttagaaattgcaatagttgtatactgttgaaaatcaataaaatttatttttgcagtaatctcttttaaataaatttgtaattcctgtttagtatttaatatttgccgttcttccatatatcctcctagtaaaacctaaaatattccaattaaagctcctaaaatacttacaattacaatcccaattaacaaataattaactttaatccctttttttattaatacgtagatcaaatacgtagttaataatgataacatttttggcataattccattaatgatatcatttattgcaactgctgaatcaccgctgccgatagttaatgctaaattgacactaaccattgatgcaaccatccccccaataactagtagccctaaaatagaagcggcactaaatattttttcagttagacctaattcctcaaattttaccaaagctttcatccctgaattatagccaaattttaaaccaaaataccgaactagaagatgcggtatattaaaaagtaataagaaaataatcggagcaaaagaattcccagctaatgccagcgaacatgcaataccgcctgcaagggggcgtaatgtaccccaaaaaatagaatcgccaattccagctagcggacccattaaacttacttttattgcgttaatagaactttcatcaaactcctgatcttcggcatttttttcttcaagagctaatgtcacgcctaaaataaatgggcataatgcaggcgttgaattaaaaaattctgagtgtctgactagtgcttttgataaatcttttttgtcatcatatagttttgttaatgctggactaagtgcatattgtattccttggctcatatgtcgttcataattaaaagatgcatttacacacatagatcgccaaaataatttatttatatctttcttagtaattttagaaatcatcatcaatatctccttcaataacaatattttcttttgttcgttcttgtgtaatcatcaacattacaataataattccaattaatgtaattcctagaatcggcatttccaaataagccgatagaacaaaacctaataaaaagaatggtgctacttttttattaatcaacatactagctaataaggcaaatcctaaagctggtaaaattcctgtagcaactgacaacccatcattaacaaaatctggtatcatttctaatattgcttgaacagttggacctcctacataaaatgagcctgccattaatacagccataaaaataggccatgacaacgaactaataatatgcatacgattaactcccttcacattgccatttacagcatatgaatctgatttatgaagcaaataagctcttattgttaaaaaaaatgcatttgttattaacaaagaaattgtcgcaattggcaacgataaagctaatgctgcctcagttccattaccagtgcttattgcaaaagcagttcctagtaatccaccagctgtaatttcaggtggtaatgctgcaccaattgccacacttcccatgaaagcaagttctaaagtagctccaacctctagtcccgtcttaaaatcacctaacactaaacctaccaacggtcccattactatagggcgttgtatcattgaattaccaaaaacaacctctaaataaccaaataaagctaccaaacctactaatatagcttgttccattattctcactcctatctatattcttttttttgttcgcttggaacaccctgtaaaaatacttctattccttgagccacaattttttttaatagcaattcttcttcagttgttacattaaccatattggaaatagcatgtgttaattcattagctttagttccacctaaatttatactactaacttgtggacattgttcagccaatttaactgcatcctcaatattatttactactatcatcaaatcgtatttatctgtttttccctcatttatagctgtcacagaatcattaatgcttttaaaaactagctttgtttcattcggtttagccagtctcaaagctgcttttctaatctcattttctactacttcatcattggcaactaaaatacaattaggcttaatttgcgaacaccaggaataaacgatctgtccgtgtaaaagccgatgatctactcttaataatttaatcatttttattccccctaaaattcttcattttctatttcataactatgatcaagtgacaaaatcattttttgtgattcttgaatactttctctaataactgaatctagctcactattgcaatactttaaaactaaatttaatactaacaaaacattcataccggtaattaaataaaaatcataattatttttacattcaattgcatcattattgacactaccgcctaaaaaatcagtaataacaattaccttttcatttaaatgtatttttaaaaaatctaataaaaaagctttaatatcattattgccatctacatacgcatcataagtaaatagattatcttgtctcccagctattaattctattgtatttttcattccagatgctagatgtccatgtgaaagtaaaacaatatttaacatttcctcacctccctgtaactagattaacaaattacaaaaaaataattttacagtgtctaaatatttgtatataaattagttttatttacattcatcaagtaaaaatacgctatatttgacactaaatacatttctttgacactatctctatttaaaactatgtattctctatattttactttaaacgttaaaatactgctgtttattaataatttatccattatggatgcttgtcaaagatgtgaaaaaagctaaaccaagaacaatatgtatcacattaggataaaacttcttgatttagcatttattttccatatttttaaattaatgaatagccatattaatatataattatcattttagaccattttgaataataatatttttgtaccattcaaaactatctttttttattcttttaagctcttttaaattcatttcatcacgatcaacatacacaaatccatagcgttttccatacccttggtgtgtactaaccaaatctataaatgcccatggacaatatccaattaattcgaccccatcagtaatggctaattgtgcttgataaaaatgcctggttaagtaatcaattcgataatcatcatgaatacaaccatcttttgatattttatctttagctcccaaaccattttctgtaataagtagtggtaaatgatagcgatcataaattcttcttaaggtgactctcattccaattgaatctaccatccatccaaaatcagttaattcaagatattcattttttgcagcacgataaacaccttcttcaccaatcatgacttgttgatccccattacgaggttgacaatctgttccatcattttttgcagctgcaactgttgcagtagcataatagttaacacccaaaaaatccggttttgctttggcaattatatccatatcccccttttctataattggggtatatcctttttcttctaaataagaccatacaagagaattgtaacgaccataaacagcaacatctaaatataaccagcatctgattgcttcccagttatctgcagcaatcacatcacttggattacatttttctggatatatggctgtaatatttggtgcaggtccaatttttccacaaggaaccatttcatgacacaagagtgttgccttcgcagttgcaacaaacatatgatgacattgttgatatagttcctttttagtaggaattcttccaggattcatggcattaggatgattgatcataacattttgttcattgatcgttaaccaatatttgacgcgattaccataattttcaaataaaacttttgcatatttttcaaatgcatcaattgttctacgattgcaccatccaccatcttgatgaagaacataggggagatcaaagtgatacattgtaacaattggctcaatattataagaaataagttcatcgatcaaatcattataaaactgtattcctcgttcatttacttctccatcgccatctggtaagattcgtgtccaggcaattgaaaaacgataagctttcatccctaactcagccattaacttcacatcttctttgaaatgatgataatgatcacttgcaatcttaaaatctgtaattccttcaggtgggttatgaacatcctgcacagacattccttttccatcctcattatatgcaccttctacttgatatgccgaagttgaagctccccataaaaagttttgaggaaatggttttaaatttttataaaacataataatctccttatctttgaattgttagtaattgatctgagaaatcaatatttttagcatctgttgattttacagtttcatatgaatttgaatttgtaattataatcattgtttgagttgaaaggtgggcttctttaatctcatcgatatcaaaacttactaataaatctccagcttttatacgatcaccttgattaatatatgttttgaatcctttaccattgagattgacagtattgattccaatgtgaattaatatttctacacctgaatctgatataattccaattgcatgttttgttggaaataaaactgatacagttccatcacaaggagcaataacttttccttcacggggaacaatgacaataccttttcccatactttctgatgaaaaggcttcgtcttcagattgactcaatggcaatacttctcctttaataggtgataaaattatatttttatctaaatcagtaattacttcttgatcctcttttccttcaaattttaaacttaataacaatgttaaaacggcagttactacaattgaaatcaataaagcaactaaaatgttataaaaacaagtcatcgtattatcaccaatatacaataagactgctgggataccagaagatcctgttgcaaaacgatgagtctgagtcaatccagcatagagtccaccacttgctccaccaatcattgcagcaatcaaaggatatttctttggcaaattaacaccatataatgtaggttctgtaattcccatataagctgtaattgaaccagatgttgcaacttgttttaattttttatctttagtgcgaatagcaacaactgcagatgctgttgcttgagcaatgttagaacatacacatccaggtccaaaaatactgtcgtatcccaattgtcccatttgcatgacacctaatggtgcaaccccattatgcaatccaaacataaccataattggaagaaaaccaccaatcaataatgctggtgcccaacttgcattcgtacttaaaaaagtaaagaaatcagcaagatatccacctaaaatacttccaataggacctagtacagaaaatgctaaagtacccattattaagaatgtcaacattggaacaaaaacaagctcaactgattttggaatccaacgatttaaaaaacgttctacataagattgaactaaaaccacaagaataataggtataacactcgatgtataagttgcaagtgtaaaaggaattgctccaaaaaagtgtaccggttctcccgcctgtaccaaagctatccaattaggatgtaacatcatagctgcaacaccaactgccaaaatcggattacatttcaatttttgtgcttctgtataagccaatatcataggtaaaaagaagaaaactccatctgcaaatatatttaataatgtatacgtttgtgaatccgtggtaattacattaaaaacaacaagcaatgctaaaacagcttttaccatacctgctccagataaagcaggaattacaggctgaaatgttccagcaacaaattcaataattgtattaacaattccttttttttctgttacttcacttacatttttagaatctatatcaacatatttttcgacctcttcaaaaacttcactcacatgtgttcctatcactacttgaaataccccagcattttgaataacttttgtcactccatcagttccctctaatctagttacatccgccttttgttcatctgccaacttaaaacgtaatcttgttacacaatgataaacttcatttatattttcttttccaccaactaattcaacaattttctttgctagtgaattatatttcttactcattttcatttcctctctctttttcaaatcctcttgaaagataatcactacaaatgtatttgaccggtctttataattatccatcacaaagtattttcttgttttcactcccccactttagcacctttaaaaaccgctttcaataaattcaaaaaatcagaaaattagttttaaaatcctttattcattctttgttttttatgaaacttcatgaaacttttattagaatttactcattaaaaaaagaaactccatttttctatcgatcatagaaaaagaagtttcatttctcatctttcatttgatttaaaactgccacacgatgtttttctaaaactttagagtgctgtaacttaaaatgattattgttttgaaaatctctcgcaaaataacatgagaataaacaattcaaaataaagtgaatagactcctctgtcgcaaaattagaaatctttgtataaagcctttccttagaagatatcgtcaatacacaagataatttcttccttaaataattatctccaccacttgtaatcccaataacaggtacttgattgtctaataagactggtaaataacgcatcggttcccctttttcattattcccagaataagaaatcatgattgcacaatcgtctgattcaagcgttcttgaaataatccccatttcccctaactttgcaatatcgattgattttcctattgttatcatcttacgacgaaacaactcacctaaaaaaatattaggacttaatccaaaaattacaatatgcttagcttttaataaataacttgttgccatttctaacatatctgtttcgattaagtcagctgtatcttgaatgctttctatttgtactttttttatattattgataatttcatctactgaactatcttcagtgaatggataattagcatcgacatccccttgatgctgttctaaatatttcatctcgctaataaaaactttcataaattcacgccagccttcaaaccccaaagtcttcgcgaaacgaacaacagttgctttagatgtataactgtgttcggcaacttcattaattgtataattatgaagattcttttgttcatgcaaaacaaaatcaccaacagcatatctagcatctggatgattaaccatgagctcttctatcttttgtatcaaaaacatttcattcacctcttgtaatcattataggatatataagatactaagaaaagatgaataagattaaaagaaaatatttctattgtttagatatactttaaaatcattccctatatgctatactaaatttggggtgtttaaatatggaacttagggtcttaaattactttttagcaatcgccagagaagaaaatattacaagggctgcacagcagctgcatgttactcaaccaacactttctcgtcaaatcgcacaattagaggaagaattgggagtaaaattattcgtacgtagtaatcataatattattttgacagaagatgggatgctcttaaaaagacgcgctcaagaacttcttgcattagcagataaaactaaacaagattttttacataagaaagaaaatttagaaggggtcatttccattggatgcggagaatatcagtcaacccactatcttacagattgcattgctgcttttaaagagatgtatccaagggtaacctatgaattttacagtggtaatgcaagaaatatttatgacaacatcgaaagaggactattagatgttggtttaatgtcagaaccatttgatattcaaaaatttaattttatcagcatgcctaccgaagaacaatggggtctactcgttagaaaagattctctactagcaaataaagaatctattcaacctcaagatttagtagaagttcccttgattttacctgacggcaattttcaaagtaatcgggtaagaaaatggcttggcgaatattctaatcaaattcaagttattgcaattggtaatcttcaatataatgaagtactactaacagagagtcatgtcggagccgtggttggtataaaactaaaatatagttacgaaaatatagttttcatacctttttctcctagactaacacatggtacagcattagcctggaaaaaagatgaagtttttcctttagcaacaaaaacatttatagaattctcaaagaaatactttaaaagcatatctatacataaaaaataggcattagacattacaaataatgaaactatataatgaaggtgttcccagttggaatacctttatttatttttgtaagaaaggagttcaatgaaatgacaatagatgaagctagtcaaaaatataatattcccatcaaaattcttaaagaatatgagaattggggactatgtcaagaagtaaaaaaagtcatgggttcttggcattatgatgatcgtgatattgaacgtttaagcatgataataacacttcacgatattggttttaccaatgaagaaattgagaaatatatgcttttgatgatgcaaggaaaaataagtgaaaaagaacgtataaagatgttaaataaaaaaagaaacggcatccttgacgaggtgcatttgaaagaaaaacaaatttctcgattggattatttaagatacgaaataaataaagaaaaaaatatttgattaggagattaatatgaaaaaaactattggaaaaagcttagcactatatccaacgccactagttgttgttggagccatgattgataaaaaaccaaattatctgctagtaggacatttgggaatcatgggtcatgatcatgtgatgatcagccttgcctctaaccattatacaaaccgtggaataaaggagaatagagccttaacgattaatttagtagatcgatctatgttaaaaaaagctgactatgtaggttcagtaagtggatataagatcgataaatcaaatgtatttcaatatcacattggtataactagaacaccaattattgacgaatctcctgttgttatggaatgcacagtagatgatatctatgaaacatcaggctttgaaaattacatttgtaaaattactgctgttcatgcagaagataatattttaaatgaaactggaaaattagactactcattactaaaaccagtattgtttgaaatgcctacatatcaatatcttttaactggtaatgttatcggtcaatgcttaaaactagaaaaataaggaggtaatatatgaaaactataccgctatctaacagtgtgaaaattctgtttgatgtttttcaaattacaaaccaagataaatgtaaaacaagtgtacttaacgcccttaaaaatgatcattatatttcagaaggtaaaaatgatattttttataacaaaacatcacagagtcttagaaatcattacaataagttatctgcccaaattattttaaaatggcttaatcaaaataaaactattgcaattctaaaatcagcatattttgaacgtacacaagaaaattatgctattcaaaattttaatctatctttaggagaaatgacacaaatagaacaagtgaatactcatataaatttaatattagatatgcagagtgtagcagaagtagaacgtttacatcatattcattttatccaatagatatgatgaaaaaatatatttttcttactattctacttctatttacactaccccttgtcgttcacgctgatgaagataaaaatattaacgacttgcaattgaaaaaacctatagaaatagtttctaaagatgaaacaaaaagttatgaaaatatgaatattgatgttcaagtcaataaagacggttattatagtttaatgagtaatactgaaattcattactctgatggagaaatcgattatatatcacttgatgaaccgattttgctctcttttcaactttcttcacaaagaaatggagggatatggctattagacaaaaatgaaggagaacaaatgattaaagaccttactgagattaaagatgaattaaaaaaacaagggaataatgaccagttaacaaagattgaaaatatcatcgaatatctcacaagtaccggtccaattacagatgctagtacctaaaaatgaaaggagtcttctaaaatgaaaaaaatattttcgattttaatcatattaagttttatgctgctttatggaggatgtcaaaacaacagtaaagaaaaaaataatccaccatcaaattcaactgatcagtcagttatagagcaaccagctaagaccgatacaaaatctttgattgtctacttctcatggtctggcaataccaagaatcttgcacaaacaatacaatctcaaacaaatgcagatatttttgaaatagaagccgtagttccatacggtgatgattatgatactgttgtggatttagctcaggaagaacaacgtgcagatgcaagacctgcaatcacaaatcagattgaaaatattaatgaatatgatgtgatttatgttggctatccaaactggtggggtgatatgccaatgatattatatactttttttgataattatgatttatctaataaaacaattgctccattttgtacaagtggcggaagcgggctatctaatactgttaatgaaatcaaaaatttagaaccaaatgctgcagtgacaaatggtttacatattggaagttcttcagtaaataattctgataatactattagacaatggttacaggaaatcaatttggggagctaatctatgataaaaaaattagttgttttgctgttaatgtcatttatgattacaggatgtactaagataccaaacaccactactgaaacaagcactgttgacaacaaagaatcatccaaaatacttatcgcttattttagttgggcagataatacagttgtagaaaacgaaaaagcttcaatagaaagcgcacttaaacattatgaatctattggtgatcaaaatgataatgtagatgccacaagttccgcaagtattttacaacctggaaatgtaggtaaaatagcaacatggattcaagaaaatattggtggtgatttattttctatccaagtcacaataccatatccaagcaattatgatgaatgcttagatcgtgcagctgatgaaaaaacaaaagatgcgcggcctgtcttaaaagaaaaagtggataatctaaatgattacgatactgtttttattgggtatccaaattggtggtattcagtacctatgcctgtgcttactttcattgatgaaaataatctatcagataaaaatattgttttattttgttgccatggtacaggtggattatcaagaagtgtagaagatattcaaagtgaactcccaaattctgcacatctagaaacgaacgttattggagtctatcgaaatgaaatcaatgattcaaaagaagaaattatccaatggttagaaaacattggttattaaagaaaggtaatcaataaaatgaaatatattcaattaggaaattcaaatttaaaagtttcaagaatttgtcttggttgtatgggatttggtgatgccaaaaacggtcagcattcatggacaattgatgaaaagaaaacacgtgagattgtcaaacatgcgctcgacttaggtattaacttttttgatacggccattgcctatcaaagtggaacaagcgagcagtatttgggtcgagccttgaaagattttgctaaacgtaaagacattgttgttgcgaccaaatttttacctcgtacaaatgaagaaataaaaaatggtattactgcccagcagcatattaaaaatcaattaaataaaagtttagaaaatcttggaatggattatgttgatctttatatctatcatatgtgggattatcaaacacctttgtatgatattatggagggcttagatgatatggtaaaagctggaaaaattcgctatattggaatttcaaactgttatgcatatcagttagcacaagccaatgcgttggcagaaaaagaaggatttacaaaatttatttctattcaaggtcattataatttgatttttcgtgaagaagaacgtgaaatggcaaaatactgtgcagaaaataatattgcaatgacgccttacagttctcttgccggaggacgtttatcaaaattgccagatcagacatctaaacgcttagtggaagacagttatgctcgtttaaagtacgatgcaactgctttacaagatcaacttattattgatcgtgtgattgaattatcgcaaaaatacaatgtttctatgacagaaatatccttagcatggcttttaacaaaagttatttctcctgttgtaggagctacaaaaatgcatcacatcgacggtgcagtaaaagcagttaatcttactcttagtaatcaagatatagcctacttagaagaactttatgtcccacatcaattagttggtgttatggcacaaaatactactgtaacagctaaagaagagcatgtttggtcaataggaagtcaaaaagtataatttaatttttaatattatttactacaaagtaaatatatttattgatatttaatagatgtaataaaatatgtactacaaaaatcacatagaaagaggtttataaaatggacataaaaaaattatatgaaactgataaagaatttatggaaagatttgaatactttgcctttgatgaagttgttaatgaaaaaaatcaagaattagatgttgaaactcgctatcttgctattctagcagtacttttaggcagtcaggcaaaagaagcatttcaatttatattatcaaaagctttagataaaaaagtatcacctattatgatcaaagaaactgtctatcagtcttgtgattatttaggttttgggaaaatgttaccatttttagaaattacaaataatgaactttcccaaagatcaatttcattacccttacaatcccaaactacaactacccttgaaacacgtttaaaaaatggaattgatgttcaagtccaaatatttggtgaacacatggaagatgcttggaaaataaatcatatcaatcgctggctagcagaaaattgttttggagattactatactcggacaggattatcgttagttcatcgtgaaatgattacattttgctttttaatgtcgcaaggaggatgtgagccacaattagttgctcatgcaaaaggaaatatgaatttaggtaatgatgataaattcctaatgagagttgtttcacaatgcttaccttatattggctatccccgttgtttaaatgcaataacatgtataaaaaaggcgctggatgaatgaaacaaaaagtaaagataactattgatatattaatgatactttgtctttttatactaagcggctatcaattttttacacaagaagtgcatgaatggctaggaatggtaatgtttattctttttattattcataatgttcttaatttccattggtattctaaaataatcaaaggtagatattctataatacgaataatttatcttgtcatcaatatacttgttcttatatctatgctgattcaaatgtatagtggaattgttatgtcacagtatatattaacttccctaaatattcctggacatatatctacagtaagaaagttacatattttaggtgcttattggggatttatactaatcggactacatttaggtatacattggagtacccttattaaacgaataaaaataaagaaacatttatctataaatttatcaacattgtcatttatactttcaatgatcattgcattatatgggatatatgctttcttaaaaagagattttttaacctatctctttttaaaaagtgaatttgtatttatgaattttagtgaatttcaattatttttctatattgactacttagcgattataagtctatgtgttttcattgctcattatggaacaaaaatattattaaacaaaaggaggcagtataatgataaaaaaagtaattctaataattctgtttagttactgtatactgctatcaggttgtttagcacataaagagaaaacaaatacaaatgatttacaagaaaagacgtcaccccaaaaacatacaattttaaaagaaaacgaggaagagacaatggagaaaaaacttattttaaccatcaatgatattagatatgatgttacactgtatgatactcccgcggcaaatgcgttatatgatatgttacctcttgaattgacttttgaagattttaatcatattgaaaaaatagcatatttgaataagaaattaccaacaaaaaatgaacccgatggatttgaaccacacattggtgatttgtgcttatatgctccttggggaaatttatctattttttataaagattttagatactccgattctttaatttcattaggtcgtattgattcaggaatagaagatatatcgagtatgaaagataatttctcagcaagattagaaataaaggaataacatctgataatatttaaagcttatgaatattaaaattcaaataaaatataagcaaaaagatgtgtaataatgaagtttaatatatatagctatcaaggttttctttaataaagaaagtagcgttgatttacacaaaaaacattcgtcaggtaaaaatacactaatcattatttctcaagggactctaaaaatatagataataatgttttattcttgttatatttttatacccctttcaatttacctgactatctgaaaccttgcaagtcgatatataattcgttagtaactacgctcatgagaaactttcacccaatcaccctagatgtatgacatacacgttatatttaaaaagagccaccttccggtggctctaagtatgaaaagaagtgatgcttaggtactagaacagtaactatacattcattaaaaaacatggctccgttacgatataacaatcataatattagctataactcataatatttaattaagtttttaaataatcagcacactctctttgattagagtataaagccaaattagataactctaattcttttgcattaattaatactttcataatgttttctaatcttcattggtgatttgttactattgttcctaattaaagtaaatatgcttaaaaacttccaattatataaaatggatcttttcataattttcagatattatatagaataaaaaagcactagactaatagcctagtgcctcatcatctaactcagttttatttacaagatatttgctagaaagagacttataatcagccactaccattagtggattcatttcatcagtttctacaaaatccttatcatatttatagaaatacaatcttaacatcatcatcgctaagatgtgatattgtttttcttcattagttagttcctcataattttcaaagtaaatatcttcaataggtactaagtactcaaatttgtacaatttactttgttctagataattatcaatgatttcatcatcgttatctacgtaattaaaaagatgtccaaagaattcaggaccatattttactctttctaacacttcgttattcatcaattgatcatcaaaggcatatcctttaaatgagtaatcatatgaaaatctaaatttaagatatggtttatatttatcatcatctggaatatctactttatttccattaacatacatttcaatttctttttcaaatttaaatgttaaaccatatcctttcaaaaagtttgaaaaaatattttcttcagtcaatagttctttcaaacttataccatcattatcagaatcatttaaccttctagaaatactatagaatggtactttttcaatattatgttttaagttctttttcactatattgaaataacattcatatagatcatcaatatataatatttgatgatcttgttgaaacatataataacctgaatcaacgatatcaagtattacttggttattaagttctaatagccaacataatgtatttaatatttcctgatatgatgtagttttaatttgcattatttcaccccacattttccttataaatatattgttttgaaatcttataccataaattatttgagacaaattttaaaaaaaatttttaagttagattttaaaaatgagatatattttattattaataataaaactaaatttatataaacgataaagatattattaatatgttttaaacaatgaactatgtttagtttcactaatgatttttttttctagttttcaataatgatagtatataattgaaagaattattttttgtaataattgataaaatcaaataaataatgacagcacacaacacttgtacgcccacagtcatcaaaggtgagaatcccatttttgaaataggaaaaattataatccccattaatgacgatatgaaaattgaaggaattatatccttcatttgttcaaagaaactataatgtagtaaattcttatttggaaatgaatttataaatgtagaaataatatcagtgataatcattcctattgcaatacacattacaccatagttcatagaaaccaggataatcaatgttcctattattttttttataatctctaactttaaaaagatatcacttctccccatagcatttatagcctgtaaatttgctgtatgaattggccaaaaaccatatgacacacaaaatattcgtatatatggaacacaaaaaagccatttatctgttaaggctagccttacaaaaggttctgctactgatgcaaatccaatcatgcacggccacaataaatacgaacttaattgaattgcttttctcgttaattctttcaactttactttatcattttgaaatctagacatagttggaaaaatcacactacctatagaagcatttatgtttgttacaattagagaaggaaatttttctccttgattatagtatgctaaatctgtaggagaatagttttttccaataatcaaactacgtatttgcttaaatccagtatctaaaagtgcagaagccaataatttccatccatattttactaacctttttgttttcaaatatgaaaaacagagttgtggtctccaatccactgttataaatagtactattgtatcaattgctgtattagttaaatattgacccactaaagcccaagcaccataattatttttagccatatacacacctacaaatccagatatgattgtaccaatcaaagttgaccaaaaaaattttttaaaaagaagatttcttgatatgtatgcacgttgaattgaatttattgaagcaattacaattcgtattcctaatactcttaataggttagttaataaaggagaattataataagctgcaatatatggtgctgaaataaacaataatatatataaaaaaaatccaaaaatgaggttaaaatagaaaattgatgaaaaatctaaattatctgcatcttttttttgtattaaagcattaccaaatcctgatgtaacaaatacattagcgattgttataaatatcatcactattgcaactaccccataatcattgggatccaatattcttgctaaaattatagaaataaataaactcatagcttgagctgtaaatctttctccaaattgccacactaatcccgaaaaaacttttgattttaaatcagtatttcccatgtttattactcctaattaattctatgatttttgttaaaaaaataaacgtatttgcgtatctatgctcaatcaaaaaaatttttattctattattttccaaaatatttatattacttaggttactcttgattatttttctcgataaatcaaaacaattatttttaattgatctagttaataaaaagtaataaaaatagacatacattcttgctaaatcttcacttgttatattcatgttattttgaatacttttaaaataattaattactatatctatatcatcgtaagccctgtataaattgtttatattatgtgtaaccgaagattgattttgaacataattgtatagtggcttagataaaatataaagtgattttgcaacagataatataggaaatgttaaagcataatcttcaaaatcaacaacattaatatcacatatgtaatttttaattaactctgttttgaaacatttcccccaccttgtaccagaaaaacctgtatgtggtaataatttgttacgtgcattatcaaggttttgactactataaaatccatccattaaataaaaatctctagtacccatgactaagtaattttcatttacgtaattacacccaaattgtaaaacttcagggttgtatttttttagaattgctatgatagtttctagagcatcattactgaaataatcatccgcatcaataaatgtgatatattctccattagctctattcaatccatatttccaagctatcattgctccttcgttttgtttggaatatactcgtattctacaatctttgaattttgatattatagataaagtattatccgtagagccatcattaacaattattatctcaatgttactattatcaatgttcaaacagctctttatgcatttttcaataaacttttctgcattatatactggtaatataatgcttaaataaatactttctcgattttttaactccattttaattgtttattctaaagaactaggtttatattagaatattaattctcctttcatatatttaattcaattctacatattgttattcgatatctaaagttttataaaatattctccaaattttcagcaatagccatatgtataggaaaacttttttaaagtaacacctgcaatttaattctatgtaaaaattttcaattatttattattgattattatctaatttatgtaatcatcaattattatttttaaagataacacttagttttgtttttataaattcaattttttcttattcgttttgtattatgaattagttgcagcatcttcaagatgagtaataattttgctcgattatcttccatctttaaattatttaattttaatctatgcataataactcttcttcactcaacataaaagtttgatcattaaatccttttagtttcaagaaaagtggtataaaaatcaatcagcatccgttcaatactacatctacatgccacatattataataactgttatcgaaaatatttttatttaaaattgatatctcttattattaattttataaacaatcgttaaacttaataattgcttttttaataatatcaactttttatagattttaattgactcttaattctttcaaataatattcttccaacattatagttggattaaatctttgaatatctccattttttgaatactttcgatcctattactattgattgattttccatatacattttttcatgcataaaaaatttttgatttaataacgtatcattatttcagcaacaaataaaatcacatttttttacatttattgtataattaaatctcaatattattttcgttcaatagaactgttatttttattttatttaagaatatgatttatataataacaatatggcataaatctatatcaacactgctttctattgattgaagcaatttatgatttcttcaattgtattatgatgtaaaatttcgaatccaattgatacattattattcatatacataatctaatcccttctaaacaaatctcttgtatagactttatcatctacatcatctaaacaactatcatatctatttgcgataatagcttgtgattgtcgtttaaattcttctaaattgtttactaccttacttccaaagaaagtttctccttcttttaaagttggttcataaataataacttctgcacctttagctttaatacgtttcattacgccttggatagatgattgtctaaagttatcgctgttagatttcatagttaatcgatatacgccaataactactttttgttctttttcaggatcatattcattatcttcttcatatccatagtatcctgctttttctaacactctatcagcaatgaaatcttttcttgttctgttacttgcaacaatagctgtcatcatttcttgaggtacatcttggtagttagcaagtaattgtttagtatcttttggtaaacaataaccgccataaccaaatgatgggttgttataatgtgaaccaattctaggatctaaacatactccattaataatgttttgagtatctaatcctttcatttctgcatatgtatctaattcattaaagtatgatacacgtaaagctaaataagtattagcgaataacttaactgcttctgcctctgtatatcccataattaatgtttcaatatcttctttgatcgctccttcttgcagtagacctgcaaatgtatttgcagcttctactaatctaggatcattcatatctgttcccacaataattcttgaaggatatagattatcatataacgcttttgattctcttaaaaattcaggagagaagataatattcttagatcctgttttttctctaatactttgagtatatcctacagggatagtactcttaataatcatgacagcttctggattatattccattactaacttaattactgcttccactgcactagtatcaaagaaattcttctttgaatcatagtttgtaggtgcagctataactacaaattcagcaacactatatgcttcttcagcatctaatgttgctgttaagtttaatttttttgtacttaaaaagtcttcaatttcattgtcctgaattggagactttctattgttaatcatattaactttttcttcaataatatccacagccatcacttcgtgatgctgtgctagtaatgtagcgatacttaatcctacatatcctgttcctgcaactgcaattttcatgctatttctttctatcatctagtaaaatctccttcttttctaaatatggcttgttaagaatatacgaaaaattgctcttattcttttcaatatactcatcaattgtacatacaattcttgcaggtacacctgctacaaccatattattaggaacatctttagtgactatgcatcctgcaccaattatacaatttgatccaatattcacgccaggcataattattgatcttgcaccaataaaagtattatcacctactgtaatttttttataaatacaaatttcagaatttttttttcttaatacgtgagttcctccgtcatgtgttataaaacaaacatcaaaacttatacgaacgttatcacccaaagaaaccaaatatggctcagatccaaaatttatgttctttccaataaaagaacaattttctcccatattaataccctttaatcgataataagattcgccacttttatcaattctgtattgtatttccatctttagtttaagccaaattctttttataatatataccaattttaagtgctcctttatttaaatatttgaaaatcctgttttttttcatgattatataagaattcttcaattgtacatatcggcttagcaggatttcctgcatatacagtatttctttgtaactttccttttacaactgaagcactaccgataataacattttcttcaattgttgtacctggaagtacaattgaattagcaccaataaaaacattattccctatgtctattctttttaaaaatcttattctttgcttttttagttcaggatatttatatattaatgcattccaaatagaaaaatcgtgagttaacaatattacatgttttgacattgtaacattttttccaatggatataagtgaacagtccgccccatcaatttcagcagtcggatcaatataacccacaccatcataatcctctatctggattccttgtttttgtaaatacttagtatacattttcatatactttgttgtattaaaatagttaaaaaacttaataacacatcttattagaacgctgaaaattttactcatcttcttcatctttaattgtctccattttttttatcataatttctaaggaattaatttgatgttgtaatttaaacctctccttttcgagactaatacaaaaaatagagtctgttgccacgtcctctaaatgttttatctttgccttaggaaaatattcattatatagtccattatttattagatcaataagtaaaatatcttcctccctatatagaaaagtttcattgcaaaaaccttttaacttagtaaaaaacactggtgtaaatactaaacaacttccttgtaaaatatagttaaattttcttttattaaatagaataggtttaaaaaaataatatattttatgaataaaatcagttttcgaaaacgtattcattatatttgaatcatcctgtaaactattaagttttatcttaaatttttccaatgcgtctatatatatttctttatcacctaatttatgatgaaacatcaccgttttattatgtttagagacaattttgggtcctataactgcagcaccgttcttgtaatattcttttattattttgtccacaaaatgttcatcaatcattaaagtatcattattaatacagcaaacaaaactacaattttgctcattcaaagcaaactcaattcccacgttatttccattagcaaatcctaaattagatggcaataaaataacatcgactaaatcatcattttcaaataacactttcagctcattccctgtaccatttggtgaacaattatcaacaacaactatacataaatggtctgttttaataattttttttatagattctatacaatctaacgtttcatttatagtattataatgtaatattacaaacccaaatctatcattttccatatatcgctccttctaatacttataagccttcttacaaagaattatgctataagattttttcccattcttcacaaataatctttttagaaaaatcatttgcacgtttttttgataatagtttatatttttgttgtaaatcgttattctttaataattctattacggcttttgccatcagtttttcattatttgttagataacaactactcaattcatgactattgtctactggcacaagtactccatattgagcaaattctatattatctttaattctatatctataatctgtatctggagcaagtatctctcgcggacccgcatcacaatcagatgaaactattggcgttccacaagaaatcgcttctaaaagactgttacctaatccttcatacatagatggaaatacaaatgccttagaattgcgcacataatctaatggtctatccacaaatccactaaaaataacttttccttctaattgcaataatgatactaaatcaaacaatttatccttatactcaccttcacctaaaatatacaattttaaattaggaaaaaccttttctatttcactaaaagctttaattatgtgccattgccctttttgataagtcaatctaccaacacaaacaatgaaatcatcatcagtcacgaaattttcttcacttttagaaataacacaaggattatatatagttattgttttatttttattgaccccaaaattaacgcatacatcatcctgaacttttttcgagatagcaacaattaaatcagcttttttacaacagtatttttctatattgaaaagcaccttattacccaacaacatagaatccatatttctaatagagataattgtcttttcagaagtccttgataagatatttataatatctgcataagttaaaaaacttatagcaatatcaatttttctttctttctttattttctttaattctcttacaagactaagtgtgtatataatctttaataatcctgattttctttttgatttaagaacaattagttcacctgcataatcatattttttctctgtgtcttgcataactacaatggaaatatcatacttatcatggtttaatgatttacttaaattcgctactgtcttctcagctccaccacctgttaattttggaactacaaacattattctttttctcatgtttttcctcccctatctaatgattcctgcacctggaatttgaacaaaaaacaaattgtatattctatatattaaatacatatataatatagatttatatgctaaatttttaattgtatctcgtttatatattgttgttataagtttaatagaatatacaatattgattcctaagaaaaataacaaaaatctatatgccataaaaaaattcatttgaattggcaaaatagaaagagtaacaatcaatgaacaagtataagattcattgtcttcaatttcactttttattctatgaaactcaacatatgtaatatacagtaaaaataaaacatatatatatgtactcactgcaacaccaacatcatcagcataaacacttagctccgaactagaaagtaaaaaacgagttacaaagttaccaaatacataaaaacaaaccaaatatatgctagttgaaaaaataattactgttttgttactaattgaagtatcagatattttaaaaataccttttttttgtattatatagattaagataaatggaagtattataagtgatgcagagtgaaaactcaaagcaattaaaataaaaataaaagtttttctatattttttttcttttatactagtaaaggcatttaaccataatagtatagaaaaatcacaacgcattgtattaaaaattgttaagataaaaatcgatagagaaagaacataaatgtaattaaaattaccaagtagctctttctttaaaaaattataaaacaatataaatgccgataaatgaagagcaaataaaaaaaccttaaaatcaccaaacattctataaaaaagccatagtgccgtattaaagcctatctcaccatgaaaacgcgttagatattcaggtaaattcatatttgccgaataaaatattgttctatattgattagcatctatccctccaattgaataagagttatttacaccaacttcaatcgttctgtttgtagcaacaagaacatatactgcacacgagcaaaaaactaaaaactttccaagtgtcttatatttcgaagaaaacctaaatttcaatccaagtgttaataaaaaaatatcaattatccaaaaaataatataactatttaatgaattcataaatcttgtcctaccttatttgtatacttgtttagatattcgctaaccatatcttcatactctctcattgataattttctatatttatttgaagactcttgtcccttaataatactttctacaatatccaatcgccctttttctactatatacccatctgaaattgtttcgctagctcccccagtattatatgtgattactggtaggccacataaattagcttcgatattaacggttggataattatcctcataagtcggattaaataagaacgatgaataattatatatttctaccaaatcttcaacatttttcgttctagtaatactttcaatacctaacttgtttaataattgtttttgttgttcagtagttcctacaattagaatgctccattcactaggcaaaaaagacttcaattttataaaatctttaagtccttttctatcatcccaaatatttgcgatgcccaaaataattttttttctatgatgatatttgtttataaaaatacttctattgacagaattatttatgacttcaacttgatattttcctaaaaaagattgctctatctcattttttagccatttggatggtgtaacaattgttaagttatttttacttatactattaaaaacattttttttctttagataattactttttgatttatcaaataaaatagatttaggataactacctttgttaggacattgagaacactcatttttccatttattacatactacataatcataataacagcagtgtccagtatacccccaacagtcatgcattgtccaaactatttttttgtttgattttctcaaataattaaacaaaattggataatttaaataataaccatgtaagcagtgaatatgaactaaatcaggattatagttttctaattgtcttattaattttcttgttgcgattgttgaatgtaatccgtcactatcaaataatctcgcaaataaaacatgagaatacacatctagtttattatcaaatttataatgattatagtaatcaggtttatctccacgtccataaaaaatcatacactcatgaccattttcaattaatccatcacatatgttacgtactattgacccgacacttcctgacataacatttgtacatatttgcgctattttcattttttattctccaatacctcattaattttggtgattttcgaatcatcaccccaaatagcttttgaatcatatggcctgtcaggaaaaacaccgtattgaagtttgatatcatagttattatctttgataaatctttcaactctgtcagcaagtttttgtggtcttcctgaacaaatattgataataccatttgtttgatcttggcttactgtatctgcaacttgctttgcaaataaatcataatcaaggaaatcaaactgatttaaccctaatgtaaaaggaaattctttttttccatctaatactgcttgtgttatttttgaaaaaatagaactaccactagtactattaccaacaatatagaatcctcttaaccattgatatgtagtatttttatttttacattcgagttctaccatctttcttagtgcatctttgctaataccatataaactttgcggattagttggtgtatcttctttaatactcccttcaaaaaatcctacttcatgcatacttcctaggactgcaacttgtttaatatttgagtcaatcatttttttaataaacaaaaaatgacttggtaagtcatttatatgattgattgaattatgtacaaatccatctcgccatgctagatgtaataaaatatctggtttatcaaaatattcataaggatcatctactttaaataaattagcaattttaatatttgctcttttatctattttttcatcactgaaatcggtagctataacttcgaatcctctatctaacaattctgtagtaataccttgacctaaataaccatttgctcctgtaactaagattttcattattcatcctccttaagtaattgtaaaagccaaccttttaaactatatttatcatagatttctattgataattcttgataaggtttactaaagaaattcttatctatttcaaaattatttctatctacaactaatatattgttttcattataaaaatcataatttacaatatctttatttgttgtaattaatttctttttaagaccaatcatttcaatggttctcatagttaatccattttgagttggactttctatatcaatcacacattttgcactagcgtatatttcgtatgccttctttgttgggataagtttaaaatgaacatcgcccaaacttacatctttataatttttatttaataatttatttttaaaataaataaaaagatgaggcacaaatatatattcaaataagtttagttttttttgaatgcattcagttttaataccttttattattttgactctatcctcatgaccagttcctataaatgctaaatcatatttgtatgatccaatgtcatttggtacatatttgttaaaataaaacaacggtagaaattgaattacagttttgttatttaggtaatctattctgtcaaaagtaaaaattttatcataatattcccatttttttcctattcctttattatttcttatactatcccacatatataagattaatttagcatttggaaaagattttttaatacttttcaaagcactaatgggtgtatattcacctctaatacataatacgtagtcatattgtttatgcattctttccttaattctcatgtcataataattatcaaatacatgcatatatggtttaaattttaatcttcctaaagttttacaaacaacaccattgtttggcttatcgcaaaaataatcaacattcccccctaatgataccatttcatctattaaacctttggaatattctgatagcgaaataagaagtattttctttcctcttaggtcattcatttttctttactctccctctgtcttttcgatagattgtcttaaattattgattctataattatctttatacccactcatactcatatcataataaaagtcaccaaatgctttagtagctaataatccaactttacctgatactttacctaatgttttaattggtaaattagtacctggtaacataataattctatgtccttttacattagctatcatttgtaccatttttgatgtgtttgtatattcattattttgtggatagaaaacaccagattcattgttatctatcattagtttgataaactcacataagttatcgatatgtaacattgatcttttattatttaccattgggaaaactggcaactttgttgctagtttagctaattgtggataatttcctttagatccttttccatatatcattggtggtcttacaattaccactttaaatgattcatcatttagagttacaagttgattatctgcttttagtttactatcaccatagaagtttaatgcttttggtgttgtatcttcagttatgtgtgtgtcactacagccactaaatacaatcattgatgacataaagataaattgtttaacacctttatctttagctaatttagctacttcaacagttaggtcagtattaattgcataatacttttgttttacttcatcacttatgttaccaacatctgcatgtgctatcccagctacgtggaaaactatatcgtatttagaaaaatcttgttctttccaattaggattcaacatatctaatgtatcaacttcatattcatcgtctgagttgtttaaccacttttctaccgattctccaatatagctattagcaccagttattaagactttctttaatggaaaattcttatcttctttggtttgtttaagttcttcttcattaataaagttatcttgtaattgaacttttcttttgacattagtgtatgcagtatatgctgcatatcctaatgctaaagaacctaatattaatcctttatgagatttattttcttttttattatcgttattcttaatttggttacagataagtcctaaaccagtaagtcctacaacactagcaccaccaactactacagcacctatcttagcttctttatcaatcttttcaggatctactatttgtgtatctacagttttttctagttcaccagttccaccttctacgacaccatcatgcaataatactgacccaattgtcgctaagaaacatttaatatccatctttaatcccatttcgttaacgtaatcaccatcaaacttagctttcacatcaatctctaattcatctctaccattaatctgtgctcaaccagttaatcctggtgtaacatcattggcatgatatttatctctttctgcaatcaagtcatcttgattccataatgcaggtctaggtcctataacagacatctttccagtaaagatattaaagatttgtggtaattcatctaaagaagtttttcttaagaatttacctgttttagtaataaattgatctggatcttttaacatgtgagttggcatgtcactaggtgtatctgttctcatagttctgaacttatagatttcaaacaattctttatctttgcctacacgtttttgtttaaagagtactggtcctggtgaatccattttaatagccaatgctaataaacctaataatggacttagtaccacaatagcaccaccgcttaaaacaacatcaattcctcttttaaggggcagatattttttttgtttatcagtaatcatctttttcctccctattttatttcacttaaaaagatggttatatttgtgtaccatctttaataatctgattgatttcaatttctttattcattgttattagacaatgactacctatacttacgtatttgttgattattatatttggacgaattactgttcctgtattaacaagaacacattcatcaatttgagcatcgtgattgataattacatttgatgctaaaatacaacaatctctaataactgcattagcttctattacggagtaggggaatagcacacaacctgcccctacaaatgcatacttagacacaacacttgaaggatgttttaatataggcaatgaatagccaatttctttggcttgtaaaaacaatttacttcttgttttgttgttacctatagctatatgaatatgagtatattcaggataataagaactcatttcatcaatggatccaatcacttcacaattattgattgtttcattaatatggttatcatcaagaaaagaaatcttatcaaacatattcatatctcttgcaatatctagacaacatctaccatgtccgcctgctcctataattaatagattcattttcactctcccttaaaagaaacttggttctacaccaaattgtttcttatgctcttcttgccaatcttgttctttgttattctcttttggaattaagttaatgatgatttgattgttaaaagctttaatagatgtaatagagtagttgtttgttaattgctgataagcctctttaccatttgtatattggtattgtttatcatcaataatacatatcacttctgattctattttttctaatattttagtcactctttatacctcctttttgaacataaaaaaacaggttcatcgcctgttttagtcatatttatgaggtagaagatacaattcccccttaccccaaataatctagactttatgttcagaactaatgtgttatcaagttaacctgagtaatacttaattcttgcttataagttcaactcctagaataatctttctatcaaagaaaggtaaatctagttgtgctgtacaatgatgtttcatgactctaacgatataatcttgataatgtagtaggggaccttctacaataactgtcttcccattttcttggtaaccaacagatactctagcgacattatctttatctaatacattattaaagaactctatttctttttctcttaaagcagatacttcagcattctctaattgtttaatcagtccatcattcttatctttcatagacaataaaagatcattaaaatcattttgttttaaatctgactttacaaagatatagttatcaaacatatccttagtagtctttttctttgcttgcctatgaaatacttcagttttaggaataaaggcagtaagttcttttctttgattcaaattagatagtattttattagttttattactgaatacatataagacataccagttcatcttaataatcaatcgcaacaagtagttttccagtaagaatttctgtatctaatgttgcaaatcttctatatttatcaacttttttgatcatatcttctaaacctactaaaggaccatcagttggaacgaatcttcgatccactataactccttttgtatgtttgatcgtatcagtattatctaataacttttctagtaaagactgctcttcactagttaatggatatgtatctttatactcaagtaaatccactaatccattaatcgttttaaaatactctttaaattgttcatcaaaagcttcttgatcaagatcactcttgataaatacatagtcaggatatatttccttaactataaactcagctgtttcccctctaccaaaacatctttcacttttaggtataaaggcattcatgttcacttgtttgtttaaagtactaacaagttttttagttctaccagttttgcatctggctacgtaccaatacattgttacctccaacccttcca

SEQ ID NO: 224 - DNA, 87577 bp, Thomasclavelia ramosa
  source 1..87577: mol_type = genomic DNA
tgtaagttagtccaggatatttatcttggatttttattttgtttaaaaaataactgataaaagaaaaagaacctaacataaaattgaactaggttcttttaacaattaattagttattatcattttttaaaccgtcaatgatatttaatttcttaattttttgactgctgaaagcaagggtggtaaaaacaattacaaaaattgcaatagttataatgataaaactattgattggaacactgaatgaccgctcaaatattgcagctagattttcatataaaaagtacatgatgataaagcctagaggcaaactgtaaattagagttttaatgccatagaatagactttcaaaataaatcatcttattaaatgctcttggtgtcattccgatagattttaacattgaaaattcttttgttcttaatgccatactagtagaaatcgtattgatgatgtttgcgatactgattaaaccgattaaaatgataaagccatatgtgaagatgttaatgattaaaataagctggtttgcctgcttgatatcttcacttaggttaaagctgtatagtgattcttcaggataattatcggtaatttctttgatttcttttaaaactgcttcattattattactcgtataataaatattagtattatttgagtttaattgatactgattaattaattggttaaaagtatcattgctgactaaaagatttagtgagtagtgagtttcgtgaggagtttgcccaagtaaatactgattagtatatttaattttatttaaagtaatttcaatttcatcaccattgttattaaatgtagttccgattaagtgatcaagattttcttttaagatatcagtttgcttatacttccgatttaatttaatattattttctttgttgattagaatttgattttgaagttctttatttaaattagggatactatctaaatattcttgattataagtaactaaattaagatcaaggaaataagtatttccatagttttgttcattttctgttagaaatgataataattcaggattaatattatctaaactagtttctaaatttaatgatgtttctttagcaacagcaatttgagtcgtattttttagatgggctaattcgttaatcagttcttgattttgtgaattgatattaatatagccatcatagttgatattgattgaagtcatatcatatgattctttaagataataagtaaatccagaagcggttaaaaagaggatagaactaatgattaatgaaaatagggtgattcgataacggtttttattacgcttaatatttttcatcgctaaatcaccttcaaagccaaatattcggcgagtaaggaaacttgttttaatatttcgcaccttgattttagtatcttgttgattagtgattgctgcaatcggcgaaatcttactagcgtgataagctgggataatactggagataaaaattgtgataattgcgcaaataacagctgtcaagatacctttaaatgaaattgctaaaggaaatccgatttcttgtccaagattagctaagattggattgatgactttaaaggtaacagccattcctccaactcctgctatcacacctaatataatagcaataatgccaactactaagccttcaaaataaacagattgttttttttgtcgttttgttgctccgatacttgataaagttccaagataacgactgcgttcatttaaggaaattgcaaaagcattataaatcaaaccaatagaaccaatcatgataatgacaacaacaatgccaacggctgtcatcattgcttggttaaaaccatcattattactgattccgtaataataaagaagattttgatgataactaatatctccactgtctattcctaatgattgtgcggtatttgagccgttatcaaaaatatcattgtcgacatgattaagggttaaatacattttgctgcttataatgctactgctgttagcggtataaaaggaattataatacgatgcttgatcgaggtaagtagattgataaataccgacaactttaaatgttttgactggtagggcagcagtagattctagttgttcggtttcaataaatttatcagaaatttgtgttgctccagttttaacagtaatttcgtcaccgacctttacaccattttgagtttgataatactttgaaataatgatttcattactatttgctggatagtttcctttcagtagttttatttctttggagtaattgtctaattgatttagttcaatgaaaataggattgttttcatcaattaataaagtatcaattttttggaacaagacactattttgatatgcatcatcattttttaagctgtcgatctgttgtgaggtgaggttatcataagcaacatgccagcttccatcataactagatacctcaaggcgcatcatttccataaatgaggttacgaatgtagttactgcggtaaacattgcgactgatatgatgattccgacaatggttacaacggttctttttttgttggctaataattgttttagagtaagtttattaataatatgcatcttagccacctcgctttaaatcactgattattttgccatctttgatagtgattactcggttggcaagtttagcgatattattatcatgtgtaataataatgattgtttgatgatatttttcatttgcttcttttaaaagacgtatgatttcatcactgtttttactatctagattgccggttggctcgtcagcaagaactaatgaaggttgattaattaaagcccgagcgattgaaactctttgttgttgaccgccggatagttgattgggcaaatgtttgagacgattgcttaagccaagttgttcgataagggtattaaatcgtttctgatcaactttttggtgtgctaactgtaagggaagggttatgttttctttaacatttaaaacgggaatcaaattataaaactgataaattaagccaatctcattacgcctaaaaatagctaaatcattttcgttgagtgtataaatatcagtattattaataattactttaccgctgcttggatgatcaacaccaccgatttgatgcaatagggtactttttccactgccactagcaccaataatagcgatgaattcacctatttcaacatcaaaagagacattatcaagggcaatgacatggttattttcatctccatatattttagacaaattttttacacttaatatattcatatatttctcctaactgtatcattgtttatagtacagttagataatagcacagagataactgtattacaatagataatacagtttaaattaaaaatatcactaacattattttgttagtgatatgtgagtcaagccgatagcgtgatcatttaaaattcctgcaatatatgtcaatagttgccgttgggctgttgtgtagacatcatagaatgaattaatatggaataatctaaatgagtctccttcataatttaacatccaatgaatagactcaataaaactgccatgaaattgtggtttttgaacaattggatgatagctggaagtattttcttcttgataaatacgatcgagcatattggcattatttttacaatcggcggaaaaattcaaaatacgtgttttagttggatcatcgggagcgattgttgcaatcagatcataatttgctgcagcaaaaagctgattataaattaaatttttaattacggtattatccattttatcacctgttttaatatatgcacaaaaataaaaaagataaccaatctgttacaattgattatcttgatatttatcacgtgttaattcaaaaagctcgaggtctaaaaattcaccacgtttgtaagcgtgtttttttaatgttacgaggtattcgaaattatttgcaagcagaacttttctactgccgatattacgactgaaaatctctgctttaataatcttagtatcgtaattatcaaatatatatttaataatcatttttactgcttttttcattataccttgatgccaataaggctctccaagccaataaccaatttcagctaggtggctataaatgtcttcaccaaaagtaatagaaattgctcctgcgaataatccgtcgacaataatagcatattcgattaggttattattactgttttgagtaataaagtttaaataattttgagcgtcttgtggtgtataaggataaggaaaaatatcttttaagtttgcagaaacttgagggttgtttgccaaagcggctaaggcagattgatcacttagctggtaaggtcttaatcgtaaatccattatggtaaaggtttatcctctgcagtataaatagcataccattcttcacgagttaatttaacctcaactcctttaatagtatcaagcatattttttatactagttgttccagcaattggctgcatctgtgccgggtgacgcaagatccaggctgttacaattgctacctttgaaacgttatacttatcagcaagtttatctagctgttcgtttagtttaggatatttagggttatcaataaaagtatcttcgcttaatgaagatcgtatcgttgaccatggctgaatcgtaatgtcatttaatcggcagtagtttaaaatatcgccatcatggtcaattccttcatccatattggcatagataccgctatcgatcatttgagcgtgtgccggaccaaattgtaattgattaataatgattggctgtttacaatatttttttagtaactcgatctgaccgggattttggtttgaaacaccaaaatatcttacttttcctgcttgatataattcatcgaaagcttcactaacttcttgagggtccattagggcatctggacgatgtagtaataaaatatctaagtaatctgtctgcaatcttgataagatattatcgacacttgctaaaatatactctttagaaaaatcaaaacaaattccagggcgaatcccgcattttgattgaataatcatttcttttcttaattcaggatgtttttgtaatactttaccgaataattcttctgattttccaccaccataaatatcagcatgatcaaagaagttaataccagcttttaatgattctaataccaggttttcaacttcttcgggagtttttgatgcgatgcgcatacaaccaagcgctacttttgaaacctttaaattggtttgtggtaaattataatattccattttatttcctccttatatagatacatttgattatatcatgattgtaaaaatcatggtatactatatccaaggttaggtgataatatgaatgtaaaattaaagattttttgtggctttttaagtggtgtaattataggatttatcttttcaccagttaaacacggtgtaaatgtcagagtttgtaataatggtaatcatgatcgaggtgaaggataatgtcatatcaagttattaaaatgattgtttatgtagtttcggtgatgctgtcaatgtggtctttaagttgttttaattttgataatgtaattcgtaaagcaaaggtaagagaattttatttattctttttaattgcttcattatgtttaggatatttattaggttcttttattttagaatttacaacgattcatttttaacatatttttaaatctcttccatataattatgtgaggtaattatatgaaagagataagtgttaaattgggagtcgtttttttaattgcagtaatctttttatcaattaatgttggggtaaaaaaagatgaaacaatcaaaggtacagagactaaagaaaaaaaagaagaaaaagaggaaaaagcagttcaagtagcagtaacaattgataataacgttaattatatcgatttagatgattatcttttaggagtcgttgcaggagaaatgccggcaaaatttgaaacagaagcattaaaagcgcaagttgtcgcgagtcggacttttgtttacaatcgcaatttaagcgttgataatactactaatagtcaagtttatttgactgaggataaaatgcgggaaaactggggtgataagtatgatgagtatcatcaaaaaattgttgcggctatcaatgatactaacgatgaagtaatgaagtatgagggaaaatatattacggcaatgtttttttcttcaagtaatggctatactgaaaatgtagaagattattttgattcgagtgctttgccttatttgcgaagtgttgactgtcattgggatttatcgattgatccaactaatagtcggtcaaaaacttttactaaacaagaactaaaagaaaaatttaattgtgatagcttagactttaatattattgcgtataaaaaaagtggacgtgttggaacccttagtgttggtggaaaaaattatagcggacgcaaagttcgcgagatccttggattagcttcaagttgttttacgatcaaatatgaaaatggtaaatatacatttaatacgctcggtagcggtcatggagttgggatgagtcaatacggtgctcagggaatggctctcgagggagctagttataaagaaattttaaatcatttttatacaaatgttgaaattgtaaataattagtataaacctgattttagtggaaacactacaaatgaggtgaaacaatgaaactatttatgaaaagaaatcgacgggttttagtctttacaacggtagtgatgttatttttagtcggagtaggggtaattcagttagtcgtaaatcaatatcgtccgcttaaagacactgcggttgtaaaagtggaagataataaagataaagatactgacaaagaggatccccaagcaccagcagaaaaaatggtaaagccggttggtgatgacattaaaatcgtaaaaaaattttatgattcaagtttaagtgatgaagaattagaaaaagcattagtttattttgaaggtgtttatcgccctaatctaggtattgatttttcaaaagacaataaagcttttgaagtaactgcggccttttcgggaacagtaactaagaaagataatgatgcactgttaggttggattgtaacggtaactaacgaaactggtgtctctgcaacttaccaatctttaagtgaagtaaatgttgaaaaagatgcggtgattaaacagggtgataagattggaactagtggtgaaaacgtctatgaatctgaattaaagaaccacttacactttattttagagaaggacaatcaagcattaaaccccgaaaaatattttaatcaagaggtctcaaaaatagcggtataatcaaccaaatagtgataattaaaaaaattatcgctatttggttttttgccttgtaaatatctaaattcatggtacaatagttaagaaaaaataaggaggacgaatgatggcattatcaaaagaaattggtatcgatttaggtactgcaaatattttaatttatgtcaaaggtgaaggtattgttgtaaatgaaccttctgtagtagcgatagatgatgaaacaaaaaaacctttagctgtgggtcaagaagctaaagatatgttaggaaaaacaccaggaagagtaaaagcaatccgtccattaaaagatggagttattgctgattttagaattactgaaatcttaattactcattttattaataaattaaacttgaaagggattttttcaagaccaacgatcttaatttgttgtccatcaaatattacatcaattgaaaaaagtgcaatcaaagatgtggctgaaagatgcggggctaaacgtgtttttattgaagaagaaccaaaagtagctgcagttggagcagggcttgaaatctctaaaccaacaggaaatatggtaatcgatatcggtgggggaactactgacatcgcagtattatcattaggtgatattgttactagcagttctttaaaagttgctggtgatgtaatggatgaagatattattaaatttgttaaagataaatataagttattgattggtgatcgcactgctgaacaaatcaaaatggaaattggaattgcaatcaaaggaatcagcgaagaaacatttgaagttagaggacgtgacttagttacaggattacctcatacaatcactcttacagctgatgaaacagaattagcattacgtgaaacttgccaaacaatcgttagagaaactaagcatgtcttagaacaaacacctccagaattagctgctgatattatgtcacgtggtatcttcttaacaggtggaggcgctttattaacaggattagatcatttattagaaaatgagcttggggtaccagtatttgtagctgatgacgctttaaactgtgtagcaaatggttgtggtgtcatgttagaaaatactcactatgtaaaataattttaaggatatggaaacatatcctttttttgtactgaaaagtcatttcaagaaatacgtttcatagatatgaaatgctgaaacgcagtacctaaatgactttggaagattgttttaagtttatttcttgttaaaatttgaatatagagataaatggagggaagagcaatggtacatagagttaaacaggttagtatagtggtattaagtatgttagttttgttgagtactttgatcgttgggacttatgcaaaagcaactaatttggtatcaaatggtgattttagtcaaggaactaattattggagtatgaatcaaagtgatggttcgttagcaatgatgtcgagtgataatcattctttaaaggtatagattgaaaaggtcaatagtgatgactattggtggtccttaacactcaagcaggataatattgccttatcagcaaataaaaaatatcagttatcatttgacgtagaggcatcaatgagtggagatattagtttggatattgaaagcacaagcgattataataaaaaatacttagatcgtcaaatgatagcggttagtaatcaaaagaaaacatatacatttgattttgaaaagaaagacgatgatgctgtcactttagtttatcatcttgctaaaggcgatggaatcagtgattttagtaatcaaataatcaagctttctaatgttacaattattgaaattggcgatattgaaatccaaaaagcaggtgattggtatttaaatgaaggagatggagcgaacggtaaattgtcaggtgagccaaatgatcttaaggttaaagttactagtattaatcaagaaaactattggtgggctttatctttaaaaaaggagaatttagtattaagtggaaataagatttataaaatagtttttgatgctaaagcttcaaaagctggaacaattggtattgatattgaaaaatcagcagattataatgtcaaatatttagataaacagaattttgatttaactactacgagtaaagagtacagttttaattttataaaaaaagataatgatgatgtttcaattgtatttttattaaatgaaggagatggaattagtaatttcaaggatgagactattaatattagaaatgttcgtatagaggaagttaatgatttaggtgatgaatatgttgtaaatggtgattttgagacaaatacaacaagtggctggaatacgtataacagtaatggttcaaatttgaagatcaatgcagtaaatcaacaattagaagtaacttttccaaactcaaatggcagtaactattgggattgtcaattgtttcaaggagatattcttttagataatggaatctatcgtttatcttatgatttaaaaggcagtaaagctgggactatttactttgatgttgaggatactggtgattacgcaacaaaatattacccagaaacaatggttgatttcacaaaagatgttcaaacatataattttgagtttgagattaatgctgataatttattagggactcaaaaaaatgctaagatccagtttaatttaggtcccaatgaacattgtgacagcttggctggagaaactttatattttgataatatcaagatagagaaaattggttctggtgcaggaactggtgaattacaaacgactaatgtgacttttgatggaaatgatgttttagttaataattttaaaggtttaggtgttcaatgggatccttatgttgttcaccctttaactgatgaagagtggcaaacagtgactaagcgggtagatttcttaaatccagcttttgttagatgcatgatctacgctaatacatattgcgaaggttttgatgatgagggaaatcctatttatgattttgatagtttggcaaatcaggcattgattagagaattagattatttagaaagtagagatattgaagtagttttaggtgaatgggagacaccaggtcgttttggtggtgaattcgaaggaattactgttgatgatccacgctgggcaagcattattggcggatttttagattatttaattaaccaaaaaggttatacatgtattaaatattttaactatgtaaatgaagctaatagtgattggtcatattgcggtgattttgataaatggcaaacaggaattaattatcttcatactgaattagataaatatggattaaatgaaaaaaaaattacgggacctgatactgtatgggatagtgataatacttggttaaaagagattaattcaaatcaagatttagatgctaaaatagggctatatgatactcatatgtatccaacaattgatgaaattacaaatggtactattgaagaaatggtagcggaacaacgcagttgtgtgacgagaaaagacttttatatgactgaaatcggaatggttactggcaaaagtgatggggattcacaaccatatactaaagaatttagttatggagttattatggctgatgccgcaagtcaagttatgcgtggtggtttttctggtttagcaatttgggatttagatgatgctatgcataatcagcaaaatggatttcccattacagatattcgttctttaaaacagtggggattttggaattctgttgctggacgagtttttaatcaaccagaagaagaagagatacgaccattcttttatacttggtcattaatggcaaatctattcccacgtaatagcaagatcattggttcaacagcaaataaagaattaaatggtcttcgaacagttgggatggaaaaagatggtcaaatgacatatatgattgtcaacgattcaaacagtcccaaagaagtaaccattgatgttaaaaatcttaatgctaataacttaaaattattcaaatatgactattttgataatgatcgtaaggtcgatagtaatggttatccggtcgctagtaaggtacttgaaaatgtcaatcttgaagaaggatatgaagtttctttaccatctggtggtgtggtgatgctctcaactattgatattgaagatgctaaaaaggaattagttgatcaaaacgattctaaacaagataatgaaaacaaaaatgaggtagcagtcaagacaggtgatgatttaaaggctgctggatttatgatttctggattacttgctacggcatttatctatggcatgaagaaaaaaggatagtagtgataagcaaaccaaatttggtttgctttcatttttatgaaatgctatttcattttaagtgaattaaaaatattatattttgaaaagctattccaattgtttgtgtaagggtttacattattgattgattgattaaaaataagattatggagagcaaataaaaaggatatggaggaaaggtaatatgaagggaatgcataaacatgcgatagctttattgttgagtgcatcattgctgcagtctaacgtaatgcccctatgggccaatactgcaccgtcagttcgggaaacaaatcaagtagacgaactagatgatttttctaaagtcttaaatcatagtgacgggtggcaaacagtcattgatgagccaaataatttttttggtgattcaagtcgcttgattaggacagaagatagtgcgcaatatttggtttatcaattagataatctaacagattttaaagttagaatgcatagttatttaagaaatctgcgttatctcgtaaatatttatcagtctaatgacttaagcagctgggaagcagtagactatactattaccagcgctaaaactagtgattcagctttttggggtacatttgatcttatgcctaagaatattttagatgggaagaacaaatatttaaaaatagaaataaagaataatgaaaatgctgatcaaacaaaaacagtaaaaggcagtgatgaagttaattttcttaaagctgttcaaattggtaaagtagagttgactgatagtaaagctggattaattactaatacaaatactgatttaaaaacaattaagttagaaggatttgatgatagcaagacttctacattaaaaatatcagaaaataaaacaataaaattaattaatccaacaatttatgatgtaaagattgaaagtagtaatcctaaagtcgtaaaatatgaaaataatcagattattggtgttagtaatggaactgcttatttgaaagggatagtacccggggagcttgaagtatttaggtatgaaataaagattggaactggtgaaaatttggatatttcacctaagtatactaaaccagctgatgatacaggtgatagccgttatattaaacaaggaaatggtgaagaaacagataatcttattactgttgatcctgataatattattgtaaaagattatatgggtggagccatggaacttgagatgattgaatggtttgatatggatgatgctcgttgggaacgttattttcaaagaattcaatatatggagttaggctttgtcagatgtatgttagcagcttattggtattgtacaggatttgatgatcataataatcctatttatgtttgggattgtttgaacgaagatggtagtccaaaatattattctcgtgatggttatccaattgacccattaggaaataacattgaaccgaatatcaaaaggatgaaacgtttatatcaattgtttgatttctttaaaaagaataatattactgtaatgacaggtgaatggcaatatcctgaagcagcagaatggtattatgtgccaggtgaaaatttaaaacaatataatttaactttagatgatccccgttatgctcaaattgcagcggattttattgaacatatggtaaaggataaaaattatacttgtattgaacaatatgatttaggtaatgaggtaaatataaatcctggatcatatcagtatgataaatggaaacaagcaaatttaaatctttatgatcagttaaagcaaagaggtttagaaaagacaatttcgttgacaccggacctaagttactggttagatttatggtataaccaaagtattgctgatcttcatgatgttttcgaacagtatgaattccattggtatgtaaatgaagttaatttaaaaaatggagtttttgaaaatgaaatgcggatgttagttaataatgccgctggtcaggataatcctgataaaaaggtctatatgggtgaagtcggaatgcgcgattatttgaataatgttgatcaagtaacaaatatagacagctttgaatatggattatggatggctaatattcttgtacaaggaacaagggcgggaatgtctggattaacagcctggtcactagatgattctgtgcatattaatggtccaatgacttatgattattcagtagatcaaaaatcattgatgaaagtctggggactatggaattcactaggtgaatatcagggagtatcggaggatatacgaccatggtatgtaccttgggcattagcaagtaaatttatgcctaaagggtcacaaataatttacactagtccaactgaacagcaagtgtattcaacggctgccatcaatggagatgatttaacaatatccgtagtaaatcattcaggtaaagaacagcaagtgttggtaaaaattcctgaggcgactaaaaaagtggatttaagtgtttatgcttattttaaagatgatttaaatcaagatgaaaacggatatcctgttcgttctgattttaaaaagaatcttgatttgcaggaaggaattgttttaactttaccagctgatggtaatctggttttaactactatggagggtgaaaataagttcaatagtaaggatagcggatattttagtgactcaatgcagtcattacaaaatacggttgattatcaaaatattggctttaactcatatgaaaaacatcctaataatgctcaaaatcgaattaatatgaatcaggatatttttggggatgtgacaaggattaatcgtgccggcaaagataaagcttctttggtatatcaaagggctgaaggaattaaaaattttagaattcatagttatgttaaaggagcagttggaagtaattttaaagtttatggttcgaatgataaaaatgaatggacagaaataaaaataaatgaaatagagaagtattcactaactaagggatggaaatttgcagtattaactccagagtcagaaatcgaatataaatatataaaaattgagttaggaaacgaggtatcaagtacagatattcaagttggaaaagtagagttaacgaatcaaagtgaattcagtgaaccgctcaaattagaaatacctgatgatgctcaaagtagtgaatataaagaaattatgaaagatgttcaacttgctacaaatgatataatgagcatttattcaataagcggctttgaaaatttacctgaaaattgtacgttaaagagcagtgatgaaaatattgttaaaattactgatatgtcatttaaggcagttaattcaggtagtgctttagttaatgtttatagagatggaaaaataattggaagtatcattgtcaatgtatatgctttccatgattctgttgaagatggtaatggattagtatatcagcttaataatatgaagtatgatttaatggcagatgctaatgatacaacattttcacgaactaatgatggaggaaatgtaatttataagttagcgggtattaaggatttttcaattagaggatatgtggcagatagtaatgataaattgtttgaacaaattaaaatttacgcttccaaagatggaaatacttgggaaagtatagaaatcaaagtagacggtataaatgctttaagcaatccatattggcattatgcaaatattattcctcaagaagcaattactaaggattatgattatttaaagattgctattgaaggaacattaacagatcattggaagattcaagttggcgatgtacgtattcaagacaaaccatttaattctgttgttaataaaattgaattagcaaatcaagatttgaaattagcagttggaaatagccaaataattggggctaaggtttatccagaagcagtattcccatttaaagttatttttgatgctgctgataatgaaattgtttctgttgataaagatggtttagtaactgggcttaaagctggtaaaacaacagttcgtgtttattctcaggataatccagaaatttatcaagactgtacgattgaagttacagaagtgattgacagttcaaaggaaattgcagatagtattaaggagttaacgattattaataatcaaatcgttttaccggttgttgaaggttatgaaattacaattaaaagctcaagtatccctaatatcatcgatttagatggtaaagtaacaccaagtaatcaggatgaacaagtagcattggtcttagcagtaaagaataaggctacgaatgtagtatctgataccgcaaatattattgtaactgttgctaaaaaagatgaaacagttatgattgaatttgatattactgatgttgttttaaaagtttatcaagaatttgatccactagcagatattaaagtatttgaaaatgatacagatattacaaagaatgtacggatcataagtaataatgttgatttaaaccatcatggtaaatattttgttacatatgaagtaactgatagtaaaaatattacgcatagccatactcgcaatgttgaggttagaggaattaaatcaatcagttgtccagagtatcaagttgatcttactagtttgaaggacctggacccagatgtatttttaaatattgttaaagtagataaacaagttattttagataagctcaatagcaaattaactgatgaccaaacaattattagctgttatgatttggcaatgatgttaaataacaaagaatatgtactgaccgataatcaattaacgattgtatggaatgttacatcaaagatgcagggattcaaagttctgatgctagataaggatggaaatgtagttgaggttccaatgactgttaatggtaaggaaattacttttatggttgaacagttaggtacttttgcaatagttggtgaacaaaaagtagaaacaaaagaacctgatgaaaataagccagaaaataaggttgaaacagcagttaaaactggtgatgaagtttattatgcggaatatgctgtgttaggattattggcactatcattagtttatggaatgaaaaaaagaggataaaacaaaacccaagcttattgaaaaaaagtaagcttgggttattttatttgtttaatatgtcgatggtcgataatatgatcggtttcaagttttaattctagattttcatcatagtgtcgagcaaataggcagctatagataatatcaagcatgatatggatggaaatcgttgaaccaaaagtagaaacttttgaataaattcgttctcgagaatctaagaataaaacatagtcacatagttttgaaaggcggctttctccaaatgaagtaattgcaatcatcggaaccttacggcgtttcaatagttctgcggcagcgattacttcgttagtttcaccagaatatgaaattaaaatggcacaatgatccttatttgattgggcagcttgaaatagttgttcattgaccattggtgcaatctgaacattttttccgattcgaaacatcttatattgaaaatcagaggcaattctaagtggacctgagacaccataaatatcaataactttagtttgatcgagcataataatgatttttgctaagatatcattgtcaatattatttacagtaaggttgattgaatctttagctagtgttgcaatgctgtgtttgattgtatggatcgtatctctttttttaaaaggaaaattcggatttgtttcactatttctatcaaacgtatattgtaactgagctgataatgcaattttaaaatcattatatcctttatactctaatttttgacatagtctagttattgtagcgggcgaagtatacgttgctttagctaactgagaagtagacatatttaaaacatcgggtccattttttaaaatatatgttgcgattaatttttcggaagttgagaagtcaacggccatttctagttttcttagtagactcatttttatcaccaattttagtataccatttttttattattaagtttaattatttagttagataaatcaaaaaattgctttttttcataaatatgaaatgcttttttaatcaaaattgaatttaataatcacaatttttaatatttaattttttggataagcgaagaattatatattgcaaaacttcttgtttcgtgtttatgaaatatcatttcataaattgcccaataaaataataaaagtttgaaaggagattgcaactatttgtgtaagtgtttacaatcgttgtttagacaattaaactaaaagtataaatagagattagtaaggaggagaaaaatttaattaatttatgagggaaaaatataaaggagaaaggaatattatgaataggaaatttaagcgatttttgacttcattattatcattagcggtagttgctagttctggaattggaccagtaaaagccgttgataatacccctaaactggattcaaaagtttatattaacagtgataatgtattaactaaagattttgaaggatttggggtacaatgggatcctagtgatttatttgattacactgatgaacaatggtcatctttttatgaaaaagctagctttttaagccctaatgtgatgcgggtcatgctccatgatggggacagttattgtattggctttgaagacgatggaactccgatttatgattgggagtctgttatgatgaagcgtgtttataaaattttagattttgctcaacaaaatgatattccaatcatgttaggtgaatggagaagtattagtgaaagaggatatttatcttacgatgatcatggaaaaacggtaaattggagtagtcctacatgggcaaggatgattggtgattgtttagagcatttgattgttgataaaggttatacttgtattaaatactataacatgattaatgaaccaaattattataaacgagatcatggtgatgtcacaaatgaatatgtatatgatcaatggaagcaggcaattactaatttaagaaatgaaatggacagttctggtatagaaaaaattgaaaatatcaaaattgtagggccggatgtttatgattcacaagaagcttggataaatcaagcaacaagtgatgagatgaaagataaaatagaattaacagaagtgcatagatatgccccacaaagtgaggtagaaagtggacttattgaaaagaaattaaagacttggaaagaacaggctgaaagtcttgatcctgaagttgctgaggaaggatttgctttgggtgaaatgggaatttcaggaactggtcctggagattcgcaattgaatgcgagaaaatacgattatggagtggatatttttgattatggtgtccaagctattcgtgcgggattaaaatttggtagcgtatggggctttgaagatagtatgcatgttcagcataatgatattgttaataatttcaaagatcaatatggacctgctgcaacaacagaagaaggtagagattatgttgtccatacgccaacaggagatccttcaattgataatgatatcaagatatggggattttggaatgaacttggtgaagaaatggcagcccaaaatgctgagcataatgttacgggaagagctaatacagtaaaagcaagtgatgagaatctaaaaccatggtattatacttggtcaatgttatgccgttattttccatctggaacaaagattcttgaaactacagacagttatgttgatcagttaagagttacatcaggaattattccagttgcagatgataaaggtgatattagtattgcagttgttaataattcatcatctcaaaaaacattagaagtaaatatgcctaatgcagctagtaaagttgatcttaatcaatatttctattatgatggtgaaattgatgggaaaactagaccggtcaatgaaaagggtcaattgttacaatatgacacaattgaaaatgctaatcttaaggatggtgttaatgtcactttaccagcaaaatcatgtatgatcttaacttctttaggatatgagggtgaaagtcatccaatgagttttacaactggtcaaacaactgatgttgaaaaggttgaaatttatgaaactactaatgctaaccaattagaagttggtaagtcttatcaattagcagctaattatattccatctatttcaaaaggtgaaatggaatggtcagttgttgattattttggtaatgctagtgataaagcattaattgatgaaaatggacttttaacagtaaaaaaagctggtcaatttaaagtgattggtaatttaaaaggaaaaccagaaatacaggatacattagtatttaaggcaacaagttctagtattttagttgatgagttaaatgatcttgaaaatggagttgctttatcttatcaagatattataaaagatgataattcagctaattttaatggtgataaaacagttaaaagaagtgatagtaatgcaaatggtaaaccaggaattattacatatcaagcaaataacatttatgattttgaatttagtgcatattcattaaataataatcttgataaatctggaaattttgtagtagaagtttctcaaaatggtgatagctggtcaccagttgaatgtgagtttattcaaggaagtaaattaagttctggctggtatccatatacaattaaaaataaagcggtaataaaagatgatggatatcaatatttacgggtaacgatcacaagtaagtcaggttataaaacatatgatcctcaatatgctggtggatcaatatattatgattaccagggagcatcacaaatcgatattcaaagtcataatgaatttattgttaaaggacaagaattacagtttaaagcagaagtacttccaagtattgccagccaagaagtaagctggaaagtattatctcttgagggaaaaccaactgaacttgcaacaataagtccagatgggatattgactgctaaggctaaaggagaagttgtcgttgtagcaactgctaaagatactgatgttagtgcttatagtcatattaatattattaatggttattttgtagatgaaattgaagattttagtaaaatgtatcaatatggtgaatttgcttttgatgatcctaaatcatcaaatttcactgataaaacaaggattaaaagattatcagatagtaatcaaagtattgtttatgctttaagtgatattgaaaaagctacttttgaaatctataaaaatggttcatttgtaaatgattcagtagatatttatgcttctagtgacggattaacttataataaagtagagaaaaatgttgtaaatgcaggtaaagcagctagttcaactgaatattatttatatgaagtatcgactaaagagttaggtgataatgtaaattatattaagttagaattgaaaaatgatgaaataatttattgtccaatgttaggaaaaacaaagattatttataatccaattgaaaatgttgaagtaacaaatgttactttagatcaaaaagagttatctattaatgtaggacaaagcaaaactttagttaaaaaattagcaccattatatgcagatgagcaattaacttggtcaagccgtgacgaagatattgcaagtgtagatcaaaacggtatcgttactgctaaaaaggtagggagtacaattatctatgcaaaatataatgatgaaatttatgctacgagtgtgattaatgttcttggtgaaaatatggcattaaataaagatgttagtgcttcaacagaaacaaatcaatggaataaaaatccaacaggtaaactggttaatgatggtgattatgatacacgctgggtttctaaagatgggacatcaatcactaaagaacaaattacaattgatttaggtgaagtgacaactgttgataatgttaaactttattgggaatcagcaagagcaacagattttaatattgaagtgtctactgatggttcaaaatatgatatagttgaaaaattacgtgatgaggataaaaataaattaactaatgagatttcatttgatccggttgaagcaagatatgtaagaatgcagggattaacaccagcaactaagtatggttattcaatctatgaatttgaaatttataataattcagatttaaaattagcaagtagtgttgaatttaaagaaatgtcatcagaattgtatcttggtgaaaatacagcacttgatgtagttgtaactcctgatgatgcaacatatcaggatgcttcatatacttcaagcaatgagttcgttgttgtttgtaaaaacaatcagatgattgctgttggtgaaggaacagcaacaattactgccaatgtcaacggtcaaaaaataactaaagaaattactgttgttaaagataatgcccgtaagattgctcaggagctgacatcattaactgttgaaaatggtcgtgtggacttcccgacagttgacggctacagcttcagtgtattcagttctgatctggaaaaagttattgccaaagacggaagtgttaacttaccgattgaagatcaagaagtggcacttgttgtaactgtatctaaagacggcagtgaagacagtgcaaatactgatgaaatcaaagtgatggttaaaggtagcagagataaatatgagctgttggaaaaacgaatcaaagtaatcgaagaaacagactggacagtatataaaccaggtacagttaaaacatttaaagagaaattgcaggcagtcaaggaaagtctaaatgcaggagtactgttagtcagtgaagttgaaaaagcaggagaaaatcttgaagcagcatttaagggattagagatcaaaagtgataaaaagacacttgatgcgctgattaaagaactagaagaacttgataccaaagtatataccgaagtatcagtggcaagagtggaaaaagcattagaaaaagcagagacagtcagtgaaaacgaagatgccagtgaagcagaagtaaatgatgcagttcaagcactgtatgagacaaaattgggattagtggaacagatcaattatgacaatctaaaagatcggattgaagaaatagaaaaagaagatctgagcatatacagtgaagcgaccgcagctcgcttaaaagaacagatagcagaagcaaaagaagcattaaagaatgaaaatattacgaatgaagagttgcaagaagaactggcaggacttaatgaaaaatacagcagcttaaaactgaatcatgagccgggaagtgtagaagaattaataaaacgaattgaagagatggatctgagcggatacagtgaagcaagtgtaaaggaattagaaagagtaataaaagagatcaaagaagagctgttagaaggggtagaccaagtaagatatgcaaaactggcagaaaaactacagacagcatacgaaggattagaaaggaagagtgaagtaaaaccggtagaaccagaacaactggaaactccaaaaggagatgaacaggcagctaaaactggtgataacatgataattggaacatggttaatcacaatgtcagcagccgtaatggtagttatattcctaaataaaagaaggagtttagaaaaataaaaatggggttaaatagagaaagtagttcttaaccacttatagatggaggagtaatatggggttattaaagaaaattgaattggcaaataacttttcatcagtagaacggatcttaggtaaatacgttttagaaaatggtgaaaaagtattaaacatgtcaactaaagaattagccaaagcaacatttacttctccagctagtattgttcgtttttgtcgaaaacttgaatatgaaggatataatgattttaaaattgcattagcagctcaattacaatatagtcgtcttagcaatgatgatattaatgcaaactacccttttaaaggaactgatagtgtttatactgtggctagcaatattgctaatctatcaaaagaaagcattgatattacaatgaaaaatttagatttagaagaattaaggctagttgttttgatgattactaaagcgaaggtcattgatatttatggggtttcaggtccacttagaattgcaagtgactttcagtataagatgtttagaataggtaaagatgtgcggatttcacaaatgatcaatgaacagttgtttcaagctgctcaaagtacttcagaacatttggctattttaatttcttattccggagaaacagaagaagtaattgaagcagcgaagattttatatcgacgtaagattcctgcaattgcaataacttcatttggagaaaatcgtcttgtaaaatatacccaaagagtcttatatttaaattcatcagaatttatttattctaaaatcgcaactttttcttcgactctctcactacatttattgttagatattatttatggttgtgtattttctaaaaattatgaggataatttaaattataagattgaaaccgataatctaattgatcatcgtcaatcaagcattgcaatagataaatttaaataattattaaaacgatatggaagtttattttaaccatatcgttttttatttatgaaaccatatttcataaataaatataataaaaagtaaaagtctgggataccaaatcaaagattaataagattatcataacggagtgattaaattgagatgggaaagagcagtaaagcttgtatttattgtgtgcttaataatttcttcgctatctacaacaagagttaaggagttcgaaaattctaaaaccttggtagataactttgatactgaagcaccatcagcttagatttattatggaaatttatctttagttgatagttttatagatatttttcctacttggatttcaacaacgctggttcctaaaaataatggtgcaataataagttcaggtcaaaaaaatggatacgcaatttatcaagttgataatccaagtaagattacatatatttcattgaactggaatggttctggagcagttgggaaaatcggggttaatcaaatgcgccttagaaccggtgcaagagctgaccaagaagtgtatttgccattttttgatttcgaaaatgatataatatgtgcaaaactggcagaaaaactacagacagcatacgaaggattaaaaaagaagagtgaagtaacactggtagaaccagaacagccgaaaactccaaaaggaaatgaacaggcagctaaaactggtgataacatgataattggaacatgactaatcggtatggttgtaactttagggggaatagagtatatcagaagaaaaaaggcgagatgatgtactgatagagtataattagatttagataataatttcaatcaaaagaaagtgacgatttggttaagttttgcttaactataatcgtcttttttatggttttggttaagttgataaagtgtttgtaaacttcgttgacgctaaaatctcagtgtgtaaaataggtggcgtagtacagatttataacttaaaaaaaggggactatgacatgaatgagaatttgaaaaaacgtattattgtttctttggcaacagtatcagccttttctagtttggcaatggtaccattatctgcttatggtgaatatcaaggtaatgatggaactcaaaaactaaataatgggctgactagtactagtgattataatgattggtataataaccaatggaataatcaagaatccggtgaaatggatactggaaaaattgtattgacaccgggagcaaaagcaactgatctaaattttgcctggtactcagaagaaacgggaacaccaacagtaaaaatttctaccaatcaagatatgtcaggagcaaaaactgtaacgggcagtgctgacaagattaacaagaacaatagtttcaaaaactatactgctagtaataaggtagcacttaaagattatctagtggaaaatatgacttactattaccaatatagtacaaacggtgttgattggagtgatacatatacttacaaaacacacagttttagtgattatcaggcagtattagtaggagatccacaaattggagcttctggaagtaacggacaaggtactcaagatgatactgatattgcagttaatacctatgcatggaataagacattgcaaaaagcattaggagctggaggcattgcagaaaatgctagcttcattttatcagcaggagatcaaattgattattcatcaagcggaactaatggttctggagagattataagagaacaagaatatgcaggtttcttatatcctgatgtgttgagaagtacaccattagcaacaacgattggtaatcatgagtcaatggtcgatgattacagtcttcattataataatcctaatgcaagtacattaggttctacagaatctggtggagattattattatagctatggagatactctatttattagtttaaatagtaatagtcgtaatgttgaagaacatcgtcagttaatgaaagaagctgtagctagtcatgaagatgcaaagtggaaagtggttttattccatcatgatatctatggttctggttcaccgcactcagatgttgatggggctaacttaagaattttatttgcgccattaatggatgaatttaacattgatttatgtttaacaggtcacgatcattcttacgctcgtacttatcaaattctagatggaaaggtaattgaaaccgacggtgttagtgaaaatgctagtaaagcatataatccagaaggaacattatatattgccgcaggatctgcttcaggaagtaaattttacacattgaatacagttaaacaatattatattgctgaacgttctaatacaccagaaccaaccttttcaacaattgattttagtggagattctttaacaattaaaacttatgattacaatggtcaaaaatatgcaaatgatgtaactttatcaaaagatggtaatgctaaatcaattgaagaaatgaagaatgaagtagctgcgattgatacagtcaatgtaacaagtggctctaaaaatagaatcgatgaagctttaatagctgtaaatactgctttagacacacgtgatgatagtacagctgaaacagaattacaaaataaatggaatactacaagtgatccattaaattattacggttatgcccaaaatggttttgcaaatgaaaatagtactgccttaaaacgagggtattcatctttattagacaaaacgttatatgaaaatgatagtaataaagctgttacaactgcaactatcgatgaagcatataataaattagcaacagctaaaaacgaagtcgtgacaaaagctgagtttgctgaagtacagactaaatttgatcaaattggaagtactttagcacaaattagtatcggagataaaaaagatcagtatactagagcagatgtagatgctttcaagaaatcaattgcagctttaaaagttgacttcaatgaagcaactattactaagactgcattaaatgaattgagtacacaattagatacagtgacaaatgaatttttagcaaagaaaaatactgaggatattacaacagctccaattgttactccttcaacaacgccaagtaaaacaccagtaaaaacaactagcagcaaagtaaaaactggtgatgatacgtcaatcaatttagcaggtattactgctttcgtatcattgctaggaattgctggaacaaaattatttaaaaaaagaaaaattgaagaatagtcaagataaataatgaaataaacaagacagagcttgttctgtcttgttttatatatgggagaagttatgaaagagttattaaaagaatttaaacagttaagtaaaaaagaaaaaataggtcattttggagtctggctggcaattttagcatttttaatttttttatatttttttaataatgctgttgaaaaaacaccattgatggatcaagaaggtgctgtatttgaaaaagcccgagtgactgaaattatatctgaaaatcgtacagaaaatggacttcagcaaggaacgcaaatagtgaatacggagattttgtcaggtgattataaaggtcaaatagtagagactacgaatattgatagttatttgtacggtgctgattgtaaggtgggaactagggtgatagtgcagcttagtgaatataatggaaccttaagtgctagtgtttataattatgatcgcactaatacactatatacaatggtcgcaatttttttgattttattagttgtaatcggtaaacgaaaaggttttacctcagctttaggattaatttttacatttatttgtattatctttttatatctgccgatgttgtatttaggtttttcaccgttttttagtgcagttgctgtagttgttttaacgactcttgtaacaatgtattttataggtggtttttcaatgaaaactttatgttcggtactaggaacgattgcgggggtcgttgtagcaggaatctttgcaagcagttttggggcacttgggcatgttagcggctataatgttaatgatattgaaacgttactttatattggacaaaacagtaaattagatattagtggtcttttattttcaggtattttaattgcttcgcttggagcagtaatggatgtagctatgtcaatttcaactacgattgaggaaattaaatatcacaatcctagtatctcacgtaaagatttatttaaaagtggtattaaaataggtggagacatgatgggaacgatgtcaaatactttaattttagcttttacaggtggctctttaagtacattagttgttttttatgcttatgatatgccgtttttacaaatgttcaattcctatgatatgggaattgagatcattcaaggtattgcagggtcattgggagtcattctaacagttccatttgtttcgataattgctgcgattttaatgacaaaaaagaaaaaaggagattttccaaaatagtaaaaagccgctagttatctggcggttttgctataataaaaaaatgaggtggatatatgacaaaagtactattttttgatattgatggaacattaacagatacgcatgggggattgccagaaattccagccggagcccaacgaaaaatgaaggaattacaagaacgaggttatttgttatttttagcaagtggtcgtccttatgcttttattccagagattttaacaaactttggatttgatggtgctgttttgtgtaacggagcacatgtggaaatgaatggacaatttatttatcatcagcctacagatttaaaaaagacgattgatttagtaaatcatctggatgaaaataattttgaatatattattgaaacaaaacgtggagcatatttagatccgagttttaaagttttagaaaagtttttcataagttgtaatattaatgaagaatttttaattgaagactttaatagagaagatataattgcagaatgcttaaaattagaggttagtgtacccgatgagcatcaagcaaagattgaagaaattatcttaaatgattttaactatgataaacatggaacagataatgcttttgaaatctattctaatgttatttcaaaagctactggggtacaaaaagtccttgaatatttaaatttgaatgttcaagatagttatgcttttggcgacggtttaaatgatttagagatgattcaaacagttggaacaggagttgcaatgggaaatgctgttgatgaattaaaagctgttagcgatttggtttgtgattcggttcataataatggacttgaaaaagttttaaatgatttatttggataaaaaaagccaagaatttcaaatgaaattctcggttttattttttactatttttttaaaacgaagtgatgaccaggtgttacaaaatctaataatatcatttcttcttctttaactgttgctactaaattacgttcaccatcatttggaatttctgttaaaacaatttccaattcaccacgataatgagctaagttatcattaacaatcaagacatcaccacgtgtgaacacttttttaccacaatcatgatgagggattgatttactgcctgcgatttctgtatttgaagtaaatccagaatcttgaactgtagctttttctttaaatttaactcttggcattgaagaacgtaacatgaatgatgagtgatcataacgatcccaatgaggggcaaaatcatacatgatcaatttttcattgtcagtaatttcaggtacttcatcaacacgaatttcaattgcttgataattaatttttgataaagcttctaactcttcatcagtagccggatagtttccgattaagatatcgtcaacgtcaccagttgctaataatgtacgagcttgtaagtcgattggtaaacctctcatgatttcgactgtaggtaaaccacagaatacttcccatggtccaattgtattagcgttgttgctagaaacaaaagcagctgtatgtaagtttaattctttccaataacggttatattccatgaatagattgaaatctaatcctgaataacgttcagggaagaagttgtggcacatgatcatttgatctttatttccaccatgattaattagtaattcaacacccatgtccatgctggcattgaattcaattttaataccatatggattacgtgtgatctggatatcaccttgtgtcccaaagtttccgtctaaacggatgatgtctaatcctaaatcagcaaatggttttaaatttcctggtgtagctccaataattttaaatacttcagggttagtatcagctgctacttcgaaccctagttcatgagccttatccatgaattctttaaattctactaaataactttcgcgcttatcttcagggattgataagaaacaagtaaagattctactaaaccctaatttagcggctttttccatataagcgtatacctcttcttttggtgatttatcagggtatactgatattcctaatttatgcatttcgttttcctccttaacaccattattataaaactatttattggttttgtcttgtattttatgcaaaaataattgataatatacaaaagataggaagtgaaaagatgaatcctagtttgattatgtcatttgttgtaactatgatcgtttcagccattctaattccgctagttatgaaggcgggtaaagaattaggaatcgtagcacacaaaaataagcgaacagttcataaggtcgaagtacctcgaatcggtggatatgcaatttacatcagttccttaattggggcggtcatctttttaaagactgatcctcaaatcaatgcaattctaattgctggtttcttggtattctttgtaggtttgattgatgatgttcatgatttatcaccgaaaacgaaattagcagttgaattgattgcagcactgattgttattgtatatggtgatatatatttaaaaggttttgattttatgccgagtaattggccaccgattattccagggattataacagttttatggattgtagggattactaatgcaatcaatttaattgatggattagatggattgtcatctggaatatcaattattgtcttgtttactgtttcaatgacttcgcttacaagtggaagaactgatattgcttcgttgtcattggttttagcaggggcaattatgggatttttattttataattttcatccagctaagatttttttaggagattgtggtgctttatatattggttttatgatttctgttatttcattattaggttttggttataatgtatcgacattttttaccttaggggcaccgattgttgttttgatggttccgataatggatacgttgattgcaatcattcgacgaaaagttaatcataaaaaatttagtgaagctgatcgggcgcatttacatcataatttaatgttcaaattgaaactagggcatcgtaaaagtgttttagttttatacggtgttacttttttgttctctttaacatcatatatttatctatatgatgcaactttaggaactttaatgtttgtcattctaatgtttattttcgaattattcattgaaacaacaagtatggtaagtcaaaagtataaaccggtattaacattagcaaatgtctttattcagagcgaccgcttgcctaagattaaattcttagaaagatatcgggctaatcgcagtgaaaaacgaaaagttattgatcatgttgtaatgctttgttgtttactcatagtaattgggggagcaggtacttatattctttatagtcgtgaaggagcttctaaaaataaccctgcgacggttcctgttgagacgccgtatatacatgaggaaggaaatgagcttttaaatgatatatatgttcgacttgataaagcttataaaaataatttaacaagcgaggaatgtcaattagtagcatcttattttgctgttgattattttactttaaaagataaaaaagatggtgaaattggtggtttagattatatttatccaagcttgcagagtgaatttagctcatttgcttcaaaatcattttatacatatagagaaacgtatccaaaattagaagttaagaattatgaaattatttcttttgcaccatctaaggtagtgattgatgatctagatgataatgaatattataacgtattaatctcaatggaattcaatcgtaaggttgacgaattacctaaaagtgtaaatatagttttagttttagataatgatcgtttttatgtagttggtgttgataatgcttagttatttaaaagtagagaatattgataatgaattgattgaatttcatttacgtcaaaagaattattattctttggaaggacaggtagttactagagaatatcttattaatgagatgcgatgtcctgacggttttgatgaaatagatcattatatagaaaaatgttatttagaaggtgaactagttggattagtcgattatcaatatggctatcgttattcgatgattcatgatgatgaatgtgtatggattggattatttttaattgatcaggataaacaaaattgtggattggggaagaggctgtttaatgattgtttaaaaaaatttaagcaacgttgtgaacggatccaattggcttgtttagtgaggaatgaagctggtttagtattttggaaaaagtgtggatttaatgagattggtaattctaaatatggtgatttaccagtaattgtattagagaaaagaatatagtaggcagctgtcaagaagatttgattaaagtgtcgatgaaatcattgtaattttaaaaatattatgttattatgttctagcgatgtatcaaagtatctaataggaggtatattatgtttgggactattctaaatgttttattagttgttatttcaatagcacttattatattatgtctattacaaagtggtaaatctgatggaattgtaaatgctttaactggtcaaagctcaaacttgtttgcacagcaaaaagaacgtggtgcagatttagtgatgacaagagttactactggtttagcaattgcatttttcgttattgcaatcattctaagaatgtcataaataatagggctaaggtcctatttttattttggaatcgggaggtgaatgaatgaaagaaaagattttggaattgttaagtgatgaaaattatttagagcgttctattgatttgatcgctgctaaattaaattgtaataaaagtgataaatttgtaaacttagttaaacttatgaatgagttggaagatgaaggtaaagtagttagaaataaatataatcattattatcttccaaatcagtttggcatgattctaggaacattaacgattaataaacgtggttttgggtttgtagtcgttgaagatcaagagaaagatatttttattagtcccgatgacttaaaggatgcgtttaataaggatactgtattagttgaattaaagaagcacagtgatgaggaacgtcctgaggggcgagttatcagggttataaaaagaggacagacaagattagttggtgaaatcaaaaaaggaaaacgtgattgctttgttgatgttgatgatccgatgttcgataaaccgatttttgtagatcgcgctcatttacacggagcgatgccgggacacaaagttcaagttgaaattaagacttataaaccgattttaaaaggtgatgttgtaaagattttagggcatcgcaatgatcctgggattgatatcttatcgatagtatatgaacacgatgcgccagttgagtttcctcaagctgtctatgatcaaatagagaatattcctgatagtttggaaggaattgatattggtcaacggattgatttgcgtgatgaggtcgttgttactattgatggtgatgacgccaaagacttagatgatggtatttcattaaaaaaattagataatggtcattatcatttaggggtgcatattgccgatgtttcttattatgttacagaagaatcaccgcttgataaagaagcatttgcacgtggaacatcaatttatttagctgatcgtgttatcccaatgctgccacataagttatcaaacggcatttgttcattaaacccgcatgttgatcgtttcacaatttcttgttttatggaaattgatgaaaatggtgaggttgtagaacatgatattgttccagcagtaattaattcgacagaacggatgacttatactaatgtaaataaaattcttgatggtgatcagacgcttcagttacagtatagtcatgtcaaagatttatttttcttaatgcaggaattagcaatgattcttcaagcgaaaaaagctagacgtggtgcgattgattttgatgttaaagaagcaaaagtactagttgatagtaaaggtaatactactgatgttgtattgagagaacgtggggcaagtgatcgtattattgaagaatttatgttattggcaaatgaaacagttgcagagcattttaaatggttagagctgccgttcatttatcgggttcatgaaaatcctaaaccgaaaaagttattacaatttagtggaattgctaaaactttaggctatacaatcaaaggttcattagaaaatgtttatccgggtgaattaagcaatatcatagaagttagtaaggatactccggaacatacaattattgcaactttattattgcgttgtatgcaaaaagcgcgttatgatgaacagtgtctaggacactttggattagctgatgaatattatacacattttacttcaccaattagacgttatccagatttaatcgttcatcgtttaattagaaagtacatgttcgaaaatcgtttagatcgtcgtactatcatgcattatcaagaattgatgcctgaaatagcactacaaacttcggctcgtgaacgtgaagcgattatgattgaacgtgaagttgatgatatgaaaattgcggagtttatggaaaaacaaattggtgaggaatttgaaggaattattagttcagttactaattttggtttctttgttgaacttgataatacaattgatgggttagtccatgtaactgatttgactgatgatttttatttctttgatgagaagaatcttcgttatattggtcagcgaacaggcaaggtgtttaagatgtctgatcgagttaaagttcgagtatcaagtgcatctaaaaaagataaatcagtagattttgaaattgttggcatgaaatccaacaaaaagacaacaaaaactgttataataaataagcgcaaagataatgatcgtaaaaacaatcgaaaacggaatgatcgtcgtaaaaagcgtcatgaagaaccacgttttacaaataatcattttaaacgctctaaaaagggtaaatctaagcgtcgcgcttaattaatcagaaaggggaaatgggcatgaaaattgtatcaaataacaagaaagcttatcatgattattttatcttagatacatatgaagcagggattgaactaaaaggaacagaaattaaatcggtccgtttaggtaatgtaaatcttaaagatgcttttgtaagaattaaagataatgaagcttatattgaaaatatgcacatttctccttatagccatggtaatcaatttaatcatgagccgttacgtaatcgaaaactattacttcataaaaaagaaattttaaaaatttcaaataaattaaaagaaggtggcttgacagttgtaccaactaagttatactttaatacaggaagtaaagtaaaattggagattggaattgctcgcggtaagaaattatacgacaagcgccaagatttaaaagaaagagattctaaaagagaaattgaaaaagctcttaagaattactgatctgggggtgtcctgggttcgacaggtgtatgtctgaccttagctgcagtcgaaggcattcgttaaatgcacaaacaaataactggaaacagacaaactaattacgctttcgcttagtcgacatagacatgaaagctgccactatttagcgtgcctatagctatttaactggtatcataaactcataggataagggtatttattgcttagctaaatacttcgaaaatctcataagctcgttaggtggaaaattgctcattgattgtagcctaattaaattaattcaatgagataaactgtagacgctttggagggattatgcttggacaggggttcgattcccctcacctccaccaataaagcaattgaccgaatagataaccaatctattcgtttttttatataaaaagaatgtgtttctcatgaattatattttaaactaatttgataatgattcattgtatttttcattggattatacaaacgatgtttggagaaaagaactattctaagaaatagagcatatgtatcaaactactaggtttaaacgaaaaagatacaaaaggaattattgaaatatgtcaaggattatgacttaataatagttattggtttgttaaagaagattatctagatatatttagtgataaaaatctatatataaattcatttaatacaaaaattgcttctattacatttactaggtaaggaagctatactagatcttccttccgtttatcacctgagtttacaactaatggtatgcttgcaaaattaaaaaggcaaggcgatgctttataagtcaagatatttcatttacccctattggtagattagttaaaactggtagtatcgaagcagttatagattattataaaaatattggagatgattattatcaagaacttatagttatgcaatggacagtgattttaaagacataaatacttatgtttcaactcgtcttccagcaacctatcaaaattttataggatttgttgaatcattaatgtcaaacatgcaaaaataaacttggaaagttaataaattataagtttgatagaaaaacaaaatataaattatcaaataaacgtttaaaacaattagaaaagctaattcaagaaagagtaatattattagatcaataagattattctttttttatgggctattatgtcttaataatatctaaactgagtattaagaaattgatggttgaggtaaaagtgaaaaggattaaatgttaatcttttttagctgatttatctttgtaaaaaatatattttatggaaatacaaatgatagattatgatttggtaagtgaagatatgatattcaaaatagagttcgaggttaagagataagtcttaaaagaaaatatataacattaatttaaaaatctgttagtaacttttatatgaaaatattttttagaaaattagacgaaataaattattgtttggaattaaatatagtattatagaattaagaagtataaattatggggatatagatatgaaaaattattatggtagtttgtgtacagaaatgtatgagatcttgcataaggatgcaccagaagacgaattagatttttatctatcttatactagaaaagatatgtcaattttagaacctttatgtggtagtggaagatttttagttccatttctagaaagaggatatgatattaagggaatagacttatctaaagaaatgcttgcaaaattaaaggaaaagtcacctaatgctaaagtgtttcaaagtgatatactggagtatgatactgtagaaaaatatgattacatctttatttcttctggttctgtatcattatttacagatatggtattatgtagaaaaattttgaaaaaaatgaagtggttgttaaaaaaaggtggcaaatttgtttttgcagttgatacagtagcgaatagatgtcctgatgattctgattatcggactgcaatagctataaagactaaagaaaggtatgatttgattcttaaaaataaaaactattacgatgaaaaaacgcatacccagttttctccaagtatttatgaactatataaaggagcagaactgttgcaacaagaaattatggattttcagacacatttatatgaattgggtgaactagaacaacatttacaggatataggatttacaagtataacagtgtattcatcgtatgaaaaaataattgctaaaaataatcatacagaaatgttcttgtatgagtgttcattttaaaaaaagggatggataaagatgatagtcttaatcacaggagcttcgcatacaggtaagacagcgcttgctcaaaagctgcttgaaaagtataaatttccatgatcatctgaaaatggggctaattcgtagcggaaacactgaattaacacctatgagtgataatgatgctctaactaaatatttatggccaattgtttgtgaaatgattaagaccgttattgaaaataagcaaagccttattatttaaagatgttatattccttttgactggaagaaaaatttcacaaaaaaatatttggataatataaggtattattgtcttataatgagtgaaaattatattagaaatcattttgatgacatcaaaaaatatggtaatgtcattgaaaatcgtctagatgatgaaaattgtactctggatagtgtgttgaaggataatgctcagttttctaaacttgcccaaaaaagtaagatgaattacatacttattgacgatccatataaaatagatattgatttataataattattgtttatgctataagaatcaaattaatatttatactattcttaaattttttattgttctatttttaatggtttatttagtgaaggtcatttactaaatttttgctacttgatataattatagaaatggtagataaatagaacaaaaaattaatgtatagatgagagaaaatattagtttaagtgaataaaggagttagacaatactggctcatgattgaaaattttaataagcacattttttaaataagagagaaaaactaaaagaataattatggattagataaggggatgtgcctggtaattgctttgtaaaaataattcaggtctatttaactagtttgggacaacagatttattgttatttgatagattataatatattgattttatgtcttacggtagtaattaagtagagggatgggaatatgaaagttaagaaaacaagacggcaattttatgactcgatttatattttggcaattaaacacggattaatgctagcaataccattcctcattcttggctcttttgctttgttgtttaatagctttccaatccccgattatcaagtctttttagcggcttttctagatggaggtttaaaagacggattaagcattatttataactgttccttaggttctattgcgttaattttaattattaccatctcactttcatacggaaaattaaatggtcaagatgatgtctttttttatcctattacagcaataatttcatacctttctttttgtggcggattgcatgaaaagacatatatttttcaatctgactgggtctttacggcaatgtgcataacccttttaacttgtgcgatgttaaaaaagggaatgcaccttgtaaatcatttagaaaaattgtatacggtagggacaaattatatttttaatcgagcaatacaaggaattttcccgatagtctttatcattattatatttacgagtgctgggcagattatgaaaggtttattaggtgatatcaatattgttaattttggctcatatttctttatatatttgtttaactggtttggtaatggaattattgggaccttgttatatgtattttttgtacattttttatggttttttggaatacatgggactaatacactggatatggttgctaagcagttgtttgagccgggagtacaaattaatcaagcgttaatacaaaatggtcaattaccaacagaattattttcaaaaacatttctagatatatttgtttttattggcggttgtggaacagcattatgtttaattttagcaatctttattgctgctaaaaaaagtaataataagaaacttgcgaaggttgcaggtatatctgtttttttcaacattaatgaaattgttatttttggttttcctgttatttttaatcctattatgctgattccttttattttgacaccgttagttttaacaataatcagtagtattgcaatgtcaactggtatagttccgtatataagtcaatcggttgaatggacagttccgattattttaagtggatatcaggcaacgggatctatcgcaggtagttttctccaaatatttaatattattatcggaacaatgctttatattccatttgtaaagtatagtgagcagatccaaagtaaagaatttgaagaatctattcttgccttagaaaatgatatgattgaaggagaacaaaatggtagtatccccgtttttttatcagatcattatcactatcattttcccgccaaaacacttgctatggatttgcgtaatgcgatgtatttacatcagctgcaattatattatcaggtacaaatgactgcggaggaacaagtatatggtgtagaagcgttgttgcgatggaatcatccagtttgtggttttgttgcaccttcattattgatttctttggcttaccaaggtggttttttgaatgaactaggtttatatattatagaaaaggcttgtcaagatgctgagcagatagatagattagcgatgaagatgaatttgtcaatcaatatttctccaaagcagctggaggatgctgattttgtttctaacgtacttaaaattattaataagtatcatttgcaatatatagaactggtttttgaggttactgaacgagctttattgaatactactaatattattacaaagcgcatattagaattgcgagatagtgggattaagttgagtatagatgattttggaatgggacacagttcaataacttatttgcaggaaaatatatttgatgaagttaagttggatggtagtttggtacagcatctattggaaaatgacagaacacgcgaaattattatgagtattactcaaatagccaagcggttaaattttagtgtagttgcagaatttgttgaaacagaggaacagattaatgtattaaaagaagctggatgtaagatttatcaaggctactattatgctaaggcagtaccattagatgaatttttacaatattgtcttattacaaggaatggtattataagatcgccaataaatgagaaagtttagtgttctgataataaaactaagggggtaaaatatggatgatgaatttattaatataacgacagaaaatgtttttaatgaacacttatgttgtattatacggagtaaaaagtttcatcctggaatagatgcaaagcgccaatggctttcaaaacgcttaaatgaaggacatgtttttagaaaattgaatgaaaggggtactgtttttattgaatatgccccattggaaaaagcatgggttcctattgttggtgataattatttctacatatattgcttgtgggttatgggaagctataaaggcaaagggtatggtaagtcactgatggattattgtttggcggatgctaaagcaaaaggaaaatcaggtgtctgtttactaggttcaaaaaaacaaaaacattggcttacagatcagtcatttgctaaaagtaatggctttgaggtcgttgatactactgatgatgggtatgaactattagcgttgtcttttgatggaactttccctcgatttactcaaaaggctaaaaagcaaaagattgaaaataaagaactaactatttattatgatatgcaatgctcttttgtttatcaaagtcttgaaatagtcaaacagtattgtgagattaataatgtacctattctaatgattcaagttgatactttacaaaaagctaaagatttaccttgtgtttttaataattgggcagtgttttatcatggggaatttgaaactgtgaatctgctagataaaaatactcttacaagattattaaaaaaatagagattataaatatataaagattggaattaaatggctgaataagccatttttttaatttttattttaaaagtactttcaaaaacattaaaaataagttggaataaaaaataaaaatgaaagtaattactaaagcaagtgaatatattgcttaataaaataaaagccattaaagttataaacaaggaggagagatttaatgaagaggattcaaaatagtttgatcgtttcatgtcaggcattagaagatgaaccgctgcattcatcattgatcatgtcaaaaatggcacttgctgcaaagatggggggagcaaaaggaataagagcaaatagtgttcaagatatccatgaaattaaaaaggaagtggatttgccaattattggtatcatcaagaaagattatgaggatacagatatttatattactacaacgatgaaagaggtggatgctctagtggcagaaggggtagatattattgcgatggatgcgacaatgcagttaagacctcataatcaaacaattactgaattttttaaggaggtaaaagcaaaatatcctcatcaattgtttatggctgattgctccactgtggaagaggcaatccatgctgataatattggatttgattttattggaacaactttagtcggatacacaccacaaagccaaaatagtcgaattgatgctaatgattttaaaattattagagagatagtgaagaatgttaagcatcctgtgattggtgagggaaatatagatactccttctaaagtaaaaagggcattagaattaggttgttatagtgtggttgtaggatcaatgattacaagaccacagttaattacaaagaaatttgtagatgagatttcaagataagggaggaaagagattatgatggataaattgtctaatgtgttattgccgattgctgagaaactttctaaaaatcgttatttgacagcaattagggatggttttgtttcaatcatgccgctagtaattactgcgtctttatttacattgatcaatagtgtatttgtaggtgaggggcattactttgatcaatggtttggagcaccatgtaatgattttgctaaaatcggtagtgtaattagttcagcctcaatgtcaattatggcaattttgctagtttttactactgctaaagctttagctaatgaatataaaatggatacttcggttgctggagcaacagcagttgtttgctttttatgtctaacaccatttgtaagtgatgcaaaaattggtgaatatgtgactacttattatttaggggcagctgggatgtttacagcatttatttctgccttgatttcagttgaattaatgagatttttgcttgggttcaaagcactggttattaaaatgccggaaagtgtacctactggaattgctagatcatttaatgcaattattcctgtagctttaacggttattatttttgcaatcctgagaattataaccgatgcaataggggcaccgcttaatgatttgatttttaactggattcaaacaccttttactgcaattgtttcatcaccggtcggattgattgttatttatgttttgtatatgcttttatggggctttggaattcattcggcatatatttttaatccaatcttagaaccaatctatttggcaagtctagcaatcaatgaagctgctattacaagtggaacagcagctaccgaaattattactaaaccatttattgattccgttgcatttatgggtggcgctggtaatatgttagcgcttgtaattgctatttttatagtttctaaaagagatgattataaggtgattggaaaattaggttttgtaccagcattatttaatatttcagaaccgctgatgtttggattacctgttgttatgaatcctatcttgatcattccaatgattttaacaactcttgcaggtttaggaattggagcgttagctacacaaattggtattatggctcatacttacgtattgatcccgtggacgaccccaccagtaatcagtgcgtttctagctactggaggagatattatgtcaggggtcattggtctacttattttggtagtatctgttcttatctatatcccatttgtaaaagttatgaataaagaaggaattgagagtattgaagaataaagttattgtttttgatctagacggtacacttttaggtgccaataatgaaatcattggaggaaccgagacattgaattgtcttgattctctccaacaaatgggatggacattagcaatatgtacaggtcggttagatcatgatattttaaaaatagaagaacaatacaaacttaaaatagagcatcgtatttctcaaaacggtgcggtttgtatgaaaggacaacaattgatagctaccttgattgataaacaagaagctataaatatctataaggagattcaaaaagaagatattcgaatcgagttaaatacagtatctaatcgttattggaaaagtgaaagagatccagctttccctagtgaattatatgattcccatatcatttgtaaagattttgataaacttatactgtatcagccagcagttttgtttcttgttattggtactgaagataaacttcgctcaatagaaacatatataaatacaacatatcaaaagacaaaagcagtgatgacttcttcaacatctttggaaatcatgcataaagatgcctcaaaaggaaatgccgtaaaaatgctatatcctaaaagtgaagtatatgcaataggtgattccccaaatgactttgatatgtttccaattgctaaaaagggttacttggttgcaaataagccttgtcaatttccctgtgctcaaaaagaaagtattttagaagcgttaaaagatataataaaaataaataaagaggacagataaaatgaaaacattatttattcctttagatgaacgaccatgcaattataattttcctttaatgattgcccagtcaaatcaacaaatcgaattagttgaaccggataaaagttttttaggtcataaaaagaagccggctcaggtggaatattttaaacaatttatcgatgaaaatattgaaggatgtgataattgtattatctcgatagatatgatcgtatatggtggattgattccatcacgattacactatttgagtgaaacagatgcgcttcaacgtttagaactaattaaatatctaaaacagttgaaacctcaaataaaaatatatgcttatcattgtattatgcgtgcaccaagttataattcgagtgaagaagaacctgattattatgaaaattacggctttgctctttttcgaagaaaatatcttcttgatctaaaaaaaagacatgggttaaatcaaaaagaaaaagatgaacttctcggtattgatattcctcaggaaattataactgattatgagcagcgtcgtttgtttaatactaagattaatttaaaggttattgattttcttgaagctggctatcttgattttctggttattccacaagatgactcgtcaccttatggatatactgcaatatcccaaaaaatcgttattaatgctttaaaggaaaaaagattagatcagaaagtaatgatctatcctggagctgacgaagtaggtctgtcattattagcacgtgcttatcatgaatactatcatttagaaccaaaagtttatcctttttacgcttcggtattaggaccaatgattattcctaaatatgaagatcgaccaatgtatgaaagtctaaaatcacatgtacgcgtatgtaaagctaagctggtcaacaatcctcaagatgctgatgtggttttagcgataaattcgccaggtaagatcatgcaagaagcttttattgataaaaatgatttagatgtaacttatacaagttatcgttatttattggcttttgctgaacaaattcaagattatataaatagtggttatcatgtggcgttatgcgacagtgcttttagtaatggtggtgatctacaattaattgaatatttagatgagctaaatattttagatcaattagtaagctatgcaggatggaatacaaattgtaattctttaggaacaactttatctcaagcttttattggtcaggaaaacgtaattaataatttatgttatcgtcttatcgaagatgttttttatcaagcaatagttagaaaagaagttgtcgaaaatgatttaccacataaaggattatcttattatgattttaaagatcaacaaacggatgtagagaatattattaaaaagaagttacagactaattttggacaccttcatcttagtcagcgctatccttttaatataacaaaaatatatatgccgtggaaacggatgtttgaaattggaatggaaattaagttataggaaacgtaagtttcctttttatgctataatcatttgtatagtaaaggaggggttaggtgttatcttataatagaagtgtgattccaattattgaatcagcttatgaagaactaacgaatgtggaaaaaaatattgctaattatttcattgatcaagttgaagatgaagatttatcatcaaaagcggtttctcaaagattatatgtatctgaagcatccttatcacggtttgctaaaaagttagggtttagtggatatcgacaatttctatttgcttatcaagattctcaccaatcaagccggcatttagatttattaactaaacaagttttaaactcttatcaaaaagttttagagaaaacttattcattgattgataacgaccaaatggttagaatagctaagatgctggatgaatataatcgagtttatatttatggaattggctcatcgtcagttgttgcaagagaatttaaattaaggtttatgagattaggattagatgttgattatttagcagaatcacattctattcggatgaatattacccgagtaaatcaagaatcattagtgattggaatcagtgtaagtggaaaaaccgaagaagttatagaaggattacgagaagcaaaagaaaaaggagctaaaacaattatgttatctgctgctcgggtatatgaatatcgttcttattatgatgaactgatcttgattggggggttaaaaaatttagctatttctgataaaatctcaccccaagttcccgccttgatcgtggttgatatcttatattcacattatcttaattataacaatgataataaaaaagaaaagctgcaaatgacattagaacatattaattatgaattagaagaataatctagtatatggatattggtaagctcatattaaaaagctaacagagtgctgctttgttagctttctttgtgaataattaattaaaatagaactttttgcagttcctctaaaaacattttagcagaacggctgaaaatttgatattttttccagacaagataaaatccagtttcaaaatttggttctaatggtcggaagcagaggttacaatcaccggttgtattaattaatttatcaaatgtaaaaacatagcctaaaccactttctacgatcattgctggggtagtgataagattaaagctgccaatcacatttagattacgataatattctttaaaccagcctgataatacgtttgcacttgattgttgatgggcaaggaaaataggttcgtctttgatatcttctggagtgattgcatttagttttgctaatggactatcttttcgcatcagtacaccccaagtatctgtatatggtaacttaagataattatatttttctagatcgattggttcaattaagatggcaaagtctaggagacctttatttaactgttctgaaacttctaaagtacttccgctaaaaatatgatacttaatattagggtattggttgtgcatccttttaaaaatttcagcaattgaatgcattacataagtttctggggcgccaatatagatatcaccggatgttgtttccccataggtgctaagttctgattcagttcgttcagttaaatcaattatttctttcgctcgttttctaagaaacatcccttcttctgttagagtaacttttcggctacctctttcaaataatttttttccaacctctgcttcaagcatatttaattgacgggataaatttggctgggtagtgtgtaaaatttcagcggcttttgtgatactttcttcttgagctactgcaagaaagtattttaaaatacgtatttccattaatattgcacctccatttaaaaaattataccataaagaaaaggtataataatatatataatataagcatttgtagtttttttaaattgtgagataattatagaaaagataaataaaggaggagaaaaaatgagttttccaaagaattttttatggggcggagctactgctgcgaaccaatgtgaaggagcctggaatgaagatggacgtggtcctgctttaacagatgttactacaggaggatcagttaaagaaagtagacaggttacttatattgacaaggatggtaaacattgtaagatcgttactagtgaagggcaggttcaattacctgaaggagcccattttgcttgtttagatgaatgtttataccctaaccatgatggtattgatttttatcatcattataaagaagatattaagatgtttgcggaaatgggttttaaaacttttagaatgtctatttcatggtcaagactatttcctcatggtgatgaagagacccctaatcaaaagggaatcgaattttatcgtagtgttttcaaggaattaagaaaatataatattgagcctttagttacaatttggcattttgatacacctttatatttaattgaaaaatatggaggatggtcaaatagaaagttgatcaagttttttgatcattatgcacgaacagtttttacagagtttaaaggtttagttaaatattggttaacttttaatgaaattaataatacaatcatgggattaggtttattctatgaggctaaagaagaggattatcaacgtgcttatcaacatttacatcatcaatttgttgcaagtgctcatgcggttaagataggtcatgaaattgattccgaaaataagattggttgtatgatttgcggtattacaagttatccagcaacatgtgatcctaaggatgttttagcaaatcgtcatcaatgggaaaaatcaatcttctattgcggtgatgtccaatgttttggtaaatatccgacttatgctaaacgtttatgggatgaacataatgttaaattagatattacagaacaagatttaatcgatttaaaagaaggtactgttgatatgtatactttctcttattatatgtcttctttgattacaactcatgagattgctgatgcagtaggtggaaactttacaacaggagcacgaaatgaatatcttcaatattctgattggggatgggcgtttgatccagatggattacaatattatcttgaaatgatttatgatcgttatcaaaggccattgatggttgtagaaaatggtttaggagcttttgatacagttgaggaagatggaacaatccatgatgattatcgtatcgattattatcgagatcatatcttggctatggataaagcaattaataatggtgttgatttaattgcgtatacgacttggggctgtatcgatctagtttcggcaggcactggtgaaatgagaaaacgttatggttttatctatgttgataaacatgatgatggaactggaacgatgaaacgtagtcctaaagattctttctattggtatcaaaaagtaatacaaagtaatggtcaagatttagattaattgagtatttaattttataagtaatgattaactgtattgtcatataaagatgacgatacagttttttgcataaataaaaagcatggaaaaccataagatataagtatttgtattttcatggcttttattgataattataagtgtagaataaaacggcttgaaaggagatggttaaattgaatgtgcagaaaattagtgaaaaagaaattgttatagcactgctcgatgctggtatggatacggaaaaaatcaatgaatttattgaaagtattaactcagaatattttaaaaaaagtaaaaatattttattaagccaaagagctgaattattattaaagattcgagatggtcaagagaaattatattgtttagattatttaactagaacactcaatcaggcaggaatatttgataaaaaataatggaggaaaaattatgatcttaaaggaaaattataaattaaataatggggtagaaatacctaaattagggttaggaacttgggaaattgctgataataaagtagctgatgcagtaaagaaagctgttaaactagggtatcgccatatcgatactgcccaaggatatgagaatgaaaatggtgttggaattggaattaaaacttgtggtgttgagcgagagaatctttttataacaacaaagattcaagcagattttaaaacatatgaagaagcgagacgatctattattgattcattaaagagattagagcttgaatatattgatttaatgatcattcatgcaccacaaccatggacaaaattcagagaagaaaatcattattttaaagaaaatatagatgtttggaaagcactggaagagttttataaaatggggaaaattagagcaatcggtttatcaaattttgaaatcgtagatattgaaaacattttaaataattgtgaaataaaacctgcggttaatcaaattttggcacatatttctaataccccatttgatataattaattattgtcaagcacatgatattttagttgaagcttattcaccagtaggtcatggagaaatgttaaaaaataatgaagttaaattaattgctgataaatatggggttacaattcctcaattgtgtattaagtattgtttacagttagataccttaccactacctaaaactgctgatccaggacatatgcaaaataatgcggatttagattttattatcagtgatgaagatatgatgcttttaaaaaatattaataaaattaaaaattatggagagtttagtgtatttccggtatatgggaaaatttaactcataaagaagaaattatataaatgaagggagattattatggcagctttaacaacgttatttccagtattttttatgctggcactaggctttatcgcacgagtaaagggatggatcacacttgaacagaaaaatggagctaatgcaataatatttaaaattttatttcctattttagtccttaatttgatgtgtacagcaacgattgaaacagaccatattaaaattattggttatgtttttggtgtttaccttctagctttagttgcaggtaaattacttgcaccacttgcgggcaagaaatatgctcatttttcaccttatttacttacagtagtagagggaggaaatgtggcattaccgttatatctttctattgttggaaaatctagtaatactgttatttttgatattgctggaacagttattgcttttattgtttttccagttttaatagctaaagaagcggcaacaggttcttcaatgaaagagatgattaaaagtatttttacaaattcttttgttattgctgtgattgtcggtcttgttttgaattttacgggaatttatgatttactgatagcatcgcaatttggtgaaatgattacaggaacattatcacaagccacaacaccgatcgtttcaatgattttatttattttaggctatgatttaaatgttgataaaaaaacattagtaccgattcttaagttaatgggaattaaaattgtttattatgcgatggttattgcgggattctttattttatttcctgcccaaatggccgataagacttttatgatggctccaattatctattttatgtgtcccactggatttggattgatgcctgttattgccccattatataaagatgaagatgatgcctcatttacaagtgcctttgtttctatctttatgattattacactgatcgtctatactttggttgttatttttattgcttaaaataagcgtgctttcttattgatttagaggagctttaagataaataatagtccatttgaccttttgataagaatataaattaaaaattaggagaaagattgaatatggaatatatacaattaaataatggtattaaaatgccaagtataggctttggtgtataccaaattccattattaatgacaaagcaatgtgtcttagatgctttagcaattgggtatcgacatattgatacagcatggaactatggtaatgaaagagaagttggagaggcgcttatagattcaggtatttcgagagctgaaatctttctaacaactaagatatatggggctgatagttatcgtcaagcatgtcagtatattgatgaagcattaaataaattacagacaaaatacattgatttaatgttgtttcattggccatctggaaatataatagaaacatatcgagcgatggaagattattataaggccggcaagttaaaagcgattggcttatcaaatttttttattcatgattttaatactgttattagttcatgtacaataattcctatggtcaatcaagttgaagcacatatttttcatcaaagaaaagtttttcaaaaagatatgaaccaatatggaatcaagcttgaagcgtgatcaccactggcatgtggaaaaaataatatctttggcaatttaatattagaaaaaatagctaaatcacatcgtaaatcaacagctcaggttgctttaagatttttaaatcaaaaaggtattgcgattatacctaaatcgatccataaagatagaataaaggaaaattgggagatttttgattttgaattaacaaatgatgaaatgaaagaaattgaattattagattgtgattgtagcttatttagctggtatgaataagtaaataatttatttagcggtagttagagaagaataacaaaaaaaggaggatgttaagaaatgaaccttccctatcatgtccaaataagggagattcacttcattagtcgtccttttttatagtttatttgtagtcacaataaacactgttgattgtattattttcgataactaatttacgttgagctagtttgtcgatgaaataacgatcgtgtgatacaaataataatgttcctgaataatttgaaagtgcatcttctaaaatttcacgagtttcaatatcaatatgattagttggttcatctaaaattaataagttgactttatgttgcattaaaatagccatttttaataatactttttcaccaccagataagtttcctactcgtttgaaaacctgatcttgataaaaagagtatttagctagaatccctctagcctcaccttccaaacaaggatattcatgacaaaatgtttgaagaattgaatcattgttattgataaaatttatttcttgaggtatatatccaattaagactgtttccgccatttttaactcaccttgataattattaaggtttccaagaagagctttaataaatgatgttttacctgaaccattatttcctagtaggactgttctttcctgataataaagtgtaaaattcacttttgaaaataaagatagattattaaaagatattccaaaatcaatgactttaagcacttctttgctactgcgttcacccaaaaagttaagtggcagtttctttttttctaattgtggtttatcgaggatttctatcttttctaaacgtttttctaattctttggcttttttaaagaatttttcattatcaccttgattaccccaatctcgataacgcttgatagaagcttttattgcttcgattttcttctgttgagttttgtattgttcaaattcttgtaataataatctttcttgttcttttaaggtgtatgagtaattaccgtggaataaacgattttcactgttatctaaaagaatagttttattagttactcgatccaaaaaatagcgatcatgtgaaataatcacaatagtcccacgatacttatttaaataattttctagccattctaacattgtaatatctaaatgattagttggttcatctaataataagatatcaggttcagttaaaattaattgggctaaattaataattgttttttgaccaccgctcaagatagcaaacggcttatctaaaatactatgcaatttaaagccggtaatgactttgtttagtttttcttcaacttcatagccgcccagggctatgtattgatcttgtattttagcatatttgtttaatatcgcttcatcgacattattatgcatcatatcttgttcaagtgctcgcattcgttgttcaatagcatgaatttcgaaaaaagatgacatcagcatatcttttactgttatatcattatcactgattgttggaatttgttctaaatagccaatagtagcttgtttgcgaatagtaatatttcctgtatcagggaattcttttttcatgatcattttaaacagtgtagatttgccactaccatttttgcctacaattcccacacgatcaccagttaaaatctcaaaattaatatcttttaatacttgtttataaccaaaatttttataaattttatgcattcctatttcaatcattgtatatttgctcctttattttataaatttatttaaaataaacagagcctaagattaataggatcaggcgattgtttctaatcgcttcgcacagctagagcattatactctgatcgcctagcctattgattaacagactctgtacgaagcacagtgccttcgactctacggcaaacataacctagaatcatcatgaccacctccctaaaatattattattttattaattctatcatatctaaattataaaaacactgaattaataatgaaaatcattaagtattggatatttagtgattaatatcgaagaatctattgataaataagaaatatatttgtttatgaaatcgaactatagtagaatagtgaagaagaaaatatttataagagaggtacattaatgaaaagaaaatatcctaaggtcattatatctgaagaaggagaaaaatggcttgataaaggtcagatgtggatgtatagaaataatgctgttaatattgatgaaacaattgaaaatggagcgttggtagatatcattactactactggccgttaccttggaacaggttttatttctaaaaatagtcacattacggtaagaattttatctaaagatataaatgaaatgtttgatcgaaacttttttaagcgaagaatacaatttgcttatgactttcgcaagacagtagaaaaagaaaatttaactaattgtcgtttggtttttggagaagcagatgaactgccgggattaacagttgatcgctataatgatattttagtttgccaaattagttcatacggattagataaaatcaaagatatgatctatgaaatattactagaggttttaacagaagatgggcaagatgttaaaggtatctatgaaagaaatgatattaaggttagagcaaaagaaggactgcctttagaaaaaggatattggagaaatattaatttaccgacaacgacgattattaatgaaaatggaatcaatttaagtgttgatgttgaaaatggtcaaaaaacaggttactttttagatcaaaaagcaaatcgtgttttacttagaaatatagcgtatggaaaaaaagttttggattgctttagtcatactgggggctttgcattaaatgcggcttatggtaaagctaaagaagtggttgcagtagatgtatcacaaactgctcttgatcagggatatgctaatgctaaactaaataatttacaaggatgtatttcttttgtaaaagatgatgtttttgactatctagataaatgtaaaaagggacagtttgatattattgttttagatccacctgcttttacgaaatcgagaagaacggtagatcatgcttataatggttataagaaaatcaatatgaaagcaatgaaattattaggcagaggtggatacttaattacatgtagttgttcacgttttatggagactgataattttgaaaagatgcttcgtgaatcagcgcatgaggctggagtaacccttaaacaagtatcagttactcaacaaaacccagaccatccaattttatggacaatggaagaaacgtcatatttaaaattttatatttttcaaattatttagattgaataggatttacgaatcgactgaatagacttttaattttaaagtttaatagtcgatttttatttaggaaaataatttagatttttttgaataatatcttatttgttgtgtattgaatttggtatgtttcatgattttccagactacaagtataaagggcgttatcatgattatcgttcaataattgctaaaggaactatcaagttaattgatggtaatgatgattacaaaattaaaaaaggatataatttattatccacctgcaatcatcgtgaaattgtccctttggaaagtagaaagacgatactcccaatatatatcggagtgattgaatgtaaaatgaagaatgttacagcgaagtctgaatttccaataaggtcagttgcagatgttccatttttagatgtatgatcattacctaaagatgaaacaccatttgatataagtgacattattgcgaaacgaaaaaataatttattgtaaaaagagaaataacaattttagttctctttttatctttatgtaatattatcttttatcatatttaaaaatgtttcagcacttttggtaaagagttggtattttttccaaattattagcatattcgcttctaattttggttcaagtggtctaaagcataatgaactattattagaattaaaaattttatctaagcataaagcatataaatttccttcttcaactattaaagatgcattaaataataaattataagttcctacaatatttaatttcctttgatttccaccaatccatccagctaattcattttttaccatcccttgatttgaacaaagaagaggttttccacgtagatcatcaggggttattttgtcaagtgatgctagagtactatcccgcttcattaaaatcccccaagcattgctataaggaagccttaaataatcgtacttatttaaatcaacaggctcaataacgattccaaaatctagaactccagcatcaattttttccattacctcttcagcttttccactatgcaaatgaaattttacatgagggtatttttccaacatcgttgcaattgtcttggcaatcggacgcattccttcactctcaccacatcctagataaatatcacctgttaatagttcttcattagctttgacttcagcttctgccctttcaacaagcccaagaatttcttctgcccgttttcttaagatcatgccttcatcagtcaaagtaatacgacgttttccccggataaataattgttttcctaattcttcttctaactctttcatttgtcttgataatgttggctgcgttacatgtagatattcagctgccccagaaatactttcttcccttgcgatggtaagaaaatattgtagtgttctaatttccattaatatcaccccatagttatattatagtacatttatgtttaacaagtataaaaaactagattataaatacatataatctagaatttatttaatgaaacatatcttttttgatgaaaataattgtggcgataatacaggcaactattgctagtcccgttgggaaccaccattgtggaaatggtaaacctgcaacattcattccataaaaactgaaaataatatttggaatagccataacgatcgtaataactgttaatactttcataacaatattcaggttattggaaataactgaagcaaatgcatccattgttcctgataaaatatttgaatagatattacacatttcaattgcctgatggatttcaatcaaaacgtcatctaataggtcttgatcttcatcatataatttaatagctttcccacgcataattttatttaatgttatttcgtccgtttttaatgaggtagaaaaatatactaatgatttttctagtcctaacatttgaatcaattctttattttgcattgatttgtgtaatctttgttcagttcgagaagagatccgatcaatttggcgcagataaattaaatatcgttgagaaattcgtaataataatagtaataaaaatcttgtttttaaatcagtattgacacctttgatccgaccttgtgccatatcatcgatatttaagttttcatataaggaaatggtaacaacgtatcctttcatgatcacaatacctaagggcaatgtcgtatattgtaacatatttttatcgtaaccatcttctacttcttcagcactaggatagtcaacgattactagagtctgattataatcttcgtcatagtcgatatgcgagctttcttcagcatctaatgaagatttaacaaattccggtagaattcccatttcttcaatcaaatagtttttttcttcttcagttggagcaatagcgctgatccagctgcctggttctggtttatcgatcttttttgtttcagttccaaaagttttgtaaaattctaacataataacctccacttacaggaggttcatgtttatgcctcctgtttctctattttattttctttttcttagcgcacaatcgctcgggcacaggggacataaaaacaccttctttcgacggttaattatatcacaaatttatcaattttacccctatgttttgttagaaaatgataaaaaaatagttaaatttaatcattagataaattattgccaaataatcttctaaatatttcattgattatgaaataattcactataatatgtatatgaatcaactagacaaaagtgagcaagaaatgtcgggatgttaggattgaggatttgttatgattgatttgacaaaggaggaacacaatgaattggactgatggaattagtaatgctttaaaatacattgaagagcatcttaaagaagatattaagatagtagatgttgcaaatgaagcatatgtttcaagtttttattttcaaaaagcatttagaattctatgtggttttagtgttgcagagtatattcgttatcgaagattatcactagccggtagtgaggtcattactacgaataagaagattattgaaattgcattagaatatggttatgattcaccagatagttttactaaagcattcactcgatttcacggagttactccgactgtcgcaagaaaagagcaattgatgattaaatcttttgctccgttaaaaatacagtttactttgaaaggtggttcaaccatggattacaaaattattgaaaaagaagcatttacagtcttaggtaaggcaagaaggtttgattttgattgtgcatttaatgagattcctaaattttggggagagcatatgcagtccgctgataaaaaagtgtgtggtgtatacggggtttgcattgaagatgaaaaagatgaaggatttaaatatttgattgctgatgagtatgttttggacagtgaaattccagatgggtatgaagtttgtgaaattccacaattaacatgggcagtatttgcttgtcatggtgctgtacctaaatcattgcaagaagtgaatacaaagattttttctgaatggttaccaaataatgatacatacgaagttgctgagcattataatattgaaatgtatacaccgtgtgaggactatccacgaggcaatcatgatgaaaattattattcagaaatttggattccggtaaagaaaaaataattattatatttaagttatgataaattaaatcgttatcataactttttcttattgattgacggattttatgatttcctttacaattaagacattgttttaaaaaggagacaatttgatgaacagagaaagattatcatcacgtctaggttttattttattatctgctggatgtgcgattggattaggaaatatttggcgttttccgtatatggttggaaaatacggtggaggggcatttgtattagtctatttatttttcctaatcatattaggtttaccaatcattgtaatggaatactcagttggacgcgcttctcaaaagagtattgctaaaagttttcatgttttagaaaagaaaggacaaaaatggcacatattttcgtatgtcgcaatggtgggaaattatttgttagtaatgttttatacgactattgccggctggatgctagcctattttgttaaaatgttgaatggtgattttattggactaaatccaagtgaagtcaacaatgtttttgtcagtcttcaagcagatccacaagctagtattttttggatgatcttgattgttgtgatcggctgtggaatttgtgctgttggtcttcaacgaggtgttgaaaaagtaacgaaagtaatgatgggattattgctaggagtgatgctcttattagttgtgaagtctttgagtttagacggtgcaataaaaggagttgaattttacttagttccagattttaatttattgatggaaaatggaatctttaatgctgtttatggtgcaatgggacaagcattttttactttgagtattggaatggggggaatggctatttttggtagttatattggtagagaacattctttaactggcgaagggttacgtgttttagcgctagatacttttgttgcaacaatggcaggattgattatttttccagcttgtatgtcttttggggtggatgcaggaagtggaccgggattagtttttgtgacactgccaaatatttttaatgttatggaaaatggtcaaatttggggtaccttgttttttgtttttatgaattttgcggctctctctacgattattgccgtatttgaaaatattgtttcattttcaatggatctattaaattggtcaaggaagaaaagtgtcattttaaattttattattattgttcttggtagtattccttgtgcagttggatatagtgttttatctggatttcagccatttggaccggggagtgcagttttagatttattagactttttagtttctaatgtaattatgccattaggatcacttgtatttttgtttttctgtactcggcgtctaggttggggttggaagaagtttatgaccgaggctaatgccggtgagggcttgcattttcctgaaaaagccaaattttacattagttggattctccccctaattgttatttttatttttctatttggattatgggagaaactattcgcataaagataataatgggcaacagttgcatctgttgcttttttgatgtggtgaaggtgagatatttttttgttaagacaaattaataattaaataatctaataatatgataaaatagtcttatagtaatggcattaacttagggtttagtttagatattgtagtagaaatataaggagagggactatgaatgaaaaattagaactattgattaatgaagtaaaaaaggctgtattaggaaaagatgatgttttaaaaaaagtagttattgctctattagctaatggacatattctacttgaagatattcctggggtcgggaaaactaatttagcggttgctttaacaaaggcaatacagttagattatcagcgggttcaattaacctctgatgttttaccaagtgatttattagggtattctgtttatgattttgaaacaaaagaaatgacttttaaaaaaggaccgctatttacaaatatctttttggctgatgaaattaatcggacgtcaagtaaaacacaatcagcactattgcaggttatggaagaaggaatgattagtgttgatgggttaacttatccaactgctaagccgtttattgttattgcaacacaaaatccgtttggaagtgctggaacacaaatgttaccagattctcagttggatcgttttatgatgcgtttatcattaggttatcctgatgaaatgagtgagattgaaattataaatcgaaaaaaaagtggaaatccaattaattcaatcaacccggttttatcgcctcaggaattgctcatgatgcaagaagcagttactaaaattcatttagatgaaagtttagtgaaatatattgttcaaatcgttcaacagacaagaattcatgaaaaaattgaattaggggcttctcctcgtgcttcgattgcattaatgaaagcggctcaagctagtgcatatttaaatggtcgggactatgttattgttgaagatattaacgaaaacttatatgaaaccctaaatcatcggattttcttaatgccaagtgttaaaaagaatcgtgaaaattttcaaataattatggaagatatcatgatgaagattgcaccaattgcatataagtagttatgtttcgctatcgtcttgcttatttgttattaattggatttggggtatttttctatattgcttttgttggatatttttcatattattttcttttattgattctgattttaccagttttatcacttttttatttagttatgagttttaaatttactaagctggattttgctattttgaatcaaaaagttattcaagatgactttgtaaagattaaaataattaaggataatttagggcttggagcaataaagtttgttgttgaggatcaaaagtatttgatcaagggaaatcaagacggattaactttagtatttaaacattgtgggggaagaaattttattattaatacatactaccaatacgattgtctaaatctattttgcataaaaaagagatgccattatgagataccaattactatttatccaaagagggtagaattagatttcaaagagtacgcacatcaactaccacgagttggtgacgaagtttatgctgtgaatcgtaaaggagatgatcctacagaaatatatgatattcacaaatatcaagagggggatcagttgaaaaatattcactggaaacttagtgcccgttatcaagatattttagttaaagataatgcgatgttagtaggtgaagtaattaatctgtatgttagttttgatgacaatgatgatcataatgatttagtttttggttatcttgataccttttgtggttttttattaaaacgacaaattggctttctattatcaaataaggaaattaaaagtattcaagaatatgacgaaatgtttaaatatttgttatggaataaagagtatcagtcagatatttctaaacataattatgagtttgttattagctataatggaatcatgaaagtggaaggtggccgctgatgaagttattaatttatttattaggaattattggttcagtaggctcgttagtttattcttttaattttagttcgaacaatcattttatttttatttcttgtattatagtaggtttgttaatatatttgggatttaattatattcaaggtaaaaagaagtttgttatcgggagtattattgctgatggaatcttattattgattcctagtacaatggattgtttaacatacataacttcaattattatttataagtatcgtgaagtttctgtatatgattttaattttgaaagtacgtatattttttatgatgatccccaaatttgtatcttagcttttttgctgatttttatcccattatttttatcagctgtaattgcaattgataaacaaaaatatacattagctattttggctttattaccaggtgtttttattgaattattatttacgattacaccaccatggtattttctagcatgttatgttttatatgttttgattttattgattggtgctttgcaaaaaggggctatattaaaaataccaatgattatcattagtgtagttgccatggcaataacatatatatcatttccaataagtacatatcgtccttcaaagtatagtttgtttgataatgccagaacaccaatttcaactcctggaaatataaaagaggaatacaatgtcaatagccaaggggatcgtcattatcgtaactcattagattttacaattgctggtgaagtgactttaaataatttcaagattcgaggaattgcttatgacttgtatgaagatggtaaatgggggacttctcatagtcgcgttgaaacagaatggtttaaaaataacctagagaagattgcaaatattacaaagacttctcgtcaagttattgaagttaatcaaatcagtggttatagtcaacgtaattatacaccatactttatcattaatgacgatatgacatattatggtgaccactatgagggtaaaaaccctcaaacatatgagatgattatacctaatgatgattttaatgctctattatcaacgatcgattataaagccaaaggagaattattaaaggaaatagccgagcgtaatggaacacaggactactacgatgaatattttggacaagggaatgaagatgatgaaaaattaacatcagttcctgaggaaacaaaatcgattattgagaattttttaaagcagcataatgttattgataatggtaatattttcaattatattacacagtgtacaaatgctttagcggctaatacttcttataccttgagaccgggaaatacacctgataatgtggatgttgttgattattttttaaatactaataagaaagggtattgtgttcactatgcttcaacattagcattaatgttaagaagtaggggatatcccgcacgttttgttgttggctatcaagtgccgggaagtaagaacaatgctggtaaattgatagttagggatagtaatgctcatgcttgggttgaaatttatgatgaatatttgggctggataccaattgaagcgactccaacaagtagtgaaaatccgaatacaccaactgatacaattactcctgcacctaaccaaggtgataaaacaccacagccagtggagccagaaaaaccggatattcaacaaatttctcaaaatgatagttttcaaattcctgtttatatttattatttagcaggagggatgatctttatctttatagttttatttcaagcaagaattcgtaaaaaacgaatgtttaaaggagctgctaatagtaatcaaaaagtctgttattattattactatttaactaaattgaaaattaattgtgatgtgataaagacaataattgataaagctcgtttttcacaacatcaaatatctattgaagaacttgaaatagtagagcagttttatcaagataaaacaaatgcatattttaaacaagcaaatttgttcaaaaaaatctatttacgttatttaatagccgttttatagagcaaagcacgcgaattaattgcgtgcttttgctataattgaattaaggagataggaaaatggctaaattgattaaagaaactactaaaagtgaacgagaaaactatcttaacaagctttttgcatgtaaaaatggggactgtgaaaattgtggagtttgtaagatttttgcaggtacttcaccgcaggaagtttattatgattatataataggaaaacgtgaatttttggagattagtcaaacttttaatagtcgcaaataaaatacagtgcttattaactgattgtaagttgctaaaacactgtatttttatatgcaatccaaataagttattaaagcttgaagttttctagtttcgttatttctaacggaataagggaataatattcatgatctgatccatattctgaagacttttttgttctaataatatattttttctaattgtaatagcactgcccgttagagctttttgtaattataggttaattgctatttggtagaatatttactgaatagtgatgacagatatcgaaggcattataatagtataggtgtaaatctatactgacaaaagtcttagatagtaaatgtgattgaaataattaagctgatctttaaactgtttaagtcgattttttatcatatttgatacatagactttaataaattatattttaatcaactatttcattaaatttttatcttattcttgatttattaaaaatacttttaaaagtctatttaaaatattctcttgagatgtttttaggaaagaaatttaagtttaattcttttattatctttttaaagccagtcttcttttaggaaataaaaaaggtttacatcaattcaaatgattaatgaattagagaaactatatcagattaaaactaataattagtctgcttttgcattcaatcgtattgacaaagagaaatatgtgtgatagattttattcatagataaacttgtgattgggagataaaacatcgaacgcgcttgtagagagtctagggtggtggaagctagatagagatgcgactttggtaaatggacccatgaaggcaaaggggaaagaagtaatttgagtatcttttgacgttagcttacgttacaaagcaaaaatgtgatagcatttgacaaagaccataaggtggtatagcagattttaacatctgtccttttaggacaggtgttttttgtttaaatgtgatttcgaaaggggaagaaaaatgagattagataagcgatggtgtagctctttataatttaaaagataaaaactataaagaaaaaggggaacataaaaatgagaattaataaactatttaaattaatggcagtatcagctttaacaatgacagctttaacaggatgtggaaatagcagtagtaatggtgatgtaaaagaggtagcgattattcaatatgttgaacatacatcattaaatacaattaaagatgcttttgatgaacagatggaggctttgggatataaagaaggtgaaaatattaagtatacttttaaaaatgctcaaggagatatgaacacagctccgtcgattattcaagattttaaatctagtaaaaaagattgtgtagttgcaatcgcaactcctgtagctcaaacagcagctgaaatgtcaactgatacaccagttgtttttgcagcggtaactgatccaattaaagctggtttaactacatctcttgaaaaaccagataaaaatattacgggaacgagtgatgagattcaagttgaaatgattttagaaagagctttacaagttaatccggatttgaaaaaaataggagtcatttataataaaggtgaagtaaattcagttactaatattgctaaagcaaaagctttttgtgatgataaaggaattgaaatgattgaaacaactgttactggagtaaatgaagtgcaaagtgcaattgatgtattaactagtaaatgtgatgcagtctttgctccaaatgataatactgtagcaaatgcaatggatatggtaggacctgcttgtgctaaagcaaaagtacctttatatgtaggcgctgattcaatggttcaagatggtggttttttaagtgttggaattaattacgaagatcttggaaaagaaactgcaaatatggttgataaaatcttaaaaggtgaaaaagtggaaaatattccagttaaagtatttaaagaaaatttaagcgtttatgtaaatacaaaagtattaaaacaattaggtattactttgcctaatgaaattaaaaatgataaagcatatgtagaaataaaggagtagttttatgaatcagacggttattttaggagcactggagttaggaggaatttttgccattctctcacttggtttatatatcagttataaagtgttaaatttgccagatttaacggttgatggaagtttcgctttgggatgtgctgttagcgggatgtttacgattaattcaatgccatatgtaggattaataggttcatttgtgattggtgcagcagctggggtagttactggtctattaattacaaaattcaaaattatgccgcttttatctgggattttaacaatgactggattatattcaattaatttagcaattatgaatgatactcctaatttatcactgtttggtaataatactatttttagcagttttactgcatttgatccttatgggaaaattattttaatatatttgattgtaattgttatttgtgtgattttagattttttcttaagaactcagctaggattatcacttagagcctgtggtgataatgaagatatggttcgagcaagctctattgatactgataaaatgaagattttaggtttagcattagcaaatggcttagtcgctatgagtggtgctgtatttgcccaacatcaaagctttgcagatattagcagtggaacaggaatgatggtaattggcttagctagtattattgtcggaacaacatttataaagaaagaaaaaattatttttcagttagttgcagttgtatttggagcaattttctatcgtgcagtcctaacagttgctctacagctgggacttccttcaggatatttaaagctgttatcagcagttcttgttattgtggcaattgcttcaactaatggagcatttagaagtaagaaaagggggcgcaattaatgttagaattaaaggatgtatcagttgtttttaatgaaggtacagttaatgaaaaagtcgcccttaataatattaatcttgcacttgataaaggggattttgttacaatcattggaagtaatggtgctggtaaatcaactttatttcaagctatttctggagcagttgatacaaaacgaggaaatattattttaaatggtcgtgatattacttttgagcctgagtacaagcgctcaaaagggattggaagattgtttcaagatcctttaaagggtacagccccaaatatgacaattgaagaaaatcttcatttgtcaaatcaaagaggtaaacattttagtttaagtctaatgtctcatcgtcatcgtgaagagtttaaaaaggcactgatggaattagagttagctttggaagaacgattagattctaaagttggattgttgtctggaggacagcgacaagcattgacgttattaatggcaactttagtaactccagatttattgttattggacgagcatacagctgctttagatccaaaaacggcattaaaggttttagaattatcacaaaaaattgttgaagagcatcagattactacactgatgattactcataatatggaagatgctctaaaatacggtaataaaacaatgattatgaaagatggacaaatcattgcaatgattgaaggcaaagaaagagaagaaatgaccgtagagggcttgattcatttgtattctacttcttctcaagaatatacggatcgagttttattaaaataaacaaaaaacatgaacttaggatttaccttgagttcatgtttttttattgaaataattatgggatacagtatcaggagtattagaattagatacttaaatagataatatagtttatcaaattctacattttttgaataaaaatattttttttgtaaataataaaagaaagtcgtagagtaaagtactctacgacaaagctaaaaaagtacttatttataagtactttttgactatgaccatatttagtgacaagaaatgttttgatttgaaaacttgtcaatccaactttttttaagatcaaatgatgaatgaacatagcggtctaaggtaatttgagaaccgctatgaccaagaatttcactaagacatttgatttcaaaaccaccctcgatacacatagttgcaaaagtatgtcttagcatatgaaagttagctttttcaattcctgcatttttaatatattttcgaaattttctttctaatgatcggggctctacaaatttgtcacttctgccagttaataaatagcaatcatcattttgcctaaattgtttaaatagagtaataagattagctggaattggaatttttcgatttgatgtagaacttttaggtgaatcttcaatgattattgttttcggattatcactgtaaatattttttattcgctgcattgttttgttaacatagatatagttttcttttagtgaaatatctttccattttaaagcgcataactcaccgattcgtaatccagtagccatggctataagtacaccaaatttgcatgaatctatttcttgtaataaagtttgattcaagtttataaattcttctttggataatatgcgttctttttctttttgttttttaggatatattattttagtatttatactaatattatgttcggattctatatatcctataatggatttaaacaaagaaagaatatcttttactgttttaggtgatagtggtttaccattttttccttcttttaataaagaagcggtaaataattcaacttgtttggtatttaattcattcgcctttatatctttaaaatatggtaataaataattatagattacattataatacttgacataagtaggggctttaaatttaattcgatacacatttaaccattcaactatataatattctaatacttgattattaatattcgactttttaattttttctttgtttaaagaattacatatattttctcttttttgtttaacttcagtataggtactagcataaacacttccatatagttttttattattagtacttattgctttaacataccgggcttcccatctgccatcttttcttctaaaaatattttctcctcttcttggcatatattatactcttctttcttttagattcttttgaccaaaaaaatgactagaaatagtacttaaatctatttaaaacattaattatttggtaaataaatttataatttagttttatcggtgttttttgacaatttatcctatcattttttgttcgataatgataaaatgcttacgtaactatagaatttttttgttcgtagagtactttaatataagacagttttgtgaccaaaagttagtttatattgtaaggaggattatgatgaattggtatattatttttgcaaatgataataagatcaatgatcttttactttattttaataatcatcctgagatgactgcttttgtaccaaaaattgaaaagttaatgaaaaaagatggaaagaaggtatttgcagaagtgccgatgtttcctaattatatctttattgaaagtgaatttaattcacaggagttttatcagattattgaaagtttagaaaaagatatggattctacaatgagaattatgcaaagtgatgaacaaaaagttttatcattagccaataatgaaaaagaacttttagaatcgttatttaatgatgatcatttaataactcgttcaatgggaactattactgattctaagttaatagttcaaaaaggaccattagttggtaaagaggaaatgattaagaaaattgatcgtcataaaagagttgcttttattggtgatgtttttggtaaaacaatgaaagttcctttggaagttacaagtaaaacataggagttgttatgaaagataactggtatgtattatttgcattagttgcaaaagaaaataagttgtgttcagttctaagaagaaaaggtcttgatgcttttattccaaagattgaatactatcgtcgagatattaaaggaaatacattaaaaatgttatttccaggatatatttttgttagaagtgaaatgaagcaaagtgattttgataatctgttatatgaattaggggaacagagagatggtttgattaagcagcttaaagatgatggagttacagctttaagagatgaagaaatcgagatgtttaataaactactcaatagcgaaggtatcttagaaatgtcccaagcatttatagaagataataaagctaaagttatatatggaccattaattcattatcaagatcatattgttaagattgataagcacaacagaatagcggttttagatatcgagtttttaaatcgacatatcttagctgggcttgaaataaaaagtaaaatttaataaatgtagctggtttaccgcacattttaataatttgaatatagtttcttctacttggggtagggggaactatattctttttttgtacaatttaactgcataaagcagttttttattatggaggggaaattaatatcaagattaggactctttctataaagagttcttttttggttactcaaattattttgatgagggagatgaaaaaatatgaaatttaaaccttttgacaataaggtatggttatcttcaccaacaatgcatggtgaagaattagaatacgtaaaagaggcttatgaaactaactggatgtctactgttggggtaaatatcaatgaagtagaaaaacttacctgtgaaaagattggaagtaaatatgcagttgctttatcagcggggactgctgcacttcatttagccatgaaactggcgggtatcaaagtatatggtatgccaaaggttggatatggtgcgttagaaggaaagaaagggatagcagtataatagggacaaccaagagaaaaccttgattttatgcgggtttcgagggcctaggtcaagccctgattatgtaattttctatggattgcgagttagattcgagaaccggagaggttgagatggcttcttgggtactcttaattgacccacaatatagagtagaaaaaataagtggaggtaattgaccaggctcagcgtgaatgtgctcacggtgagctagtggtctttttttgcctacacaaattaaaaaatgacattaatatctgtataaaatataacacagattaaaaataaacactttacaatgaacgagaggtgcatggatatgtttaatgcagaaaatcatcaatttgaaagatttgaaaataagatatggctgagtagtcctactatgcatggagaagaactgcaatatattacagaagcttatcatacaaattggatgtcaacagttggcgcaaacataaatgaaattgaaaagaagatatgtgaaaaggttgggtgcaaatatgcagtagctctttctgctggaactgcggcacttcatatggctgtgaaattagccggcgtatctcaaaatgataaaattttctgctcagatgtaacttttggggcaacagtgaaccctgtcgtatatgagggtggagttcctatttttatagatacagagtacgatacttggaatatggatccagttgcgttggagaaggcttttgaaatttatccggaagtgaaattggttgtggtggcacatttatatgggacacctggtaagattgatgagattaaagcaatatgcgataagcacggtgcagctattattgaagatgctgcagagtctttaggagctacatataaaggaaagcagacaggtacattcggaaattataatgcaatcagctttaatggtaataagattattactggttcggcaggaggaatgttcctaacagatagcttagaggatgctgagaaagtaaaaaaatggtctactcaggcacgtgaaaatgcaccatggtaccagcatgaagaggttggatataactatcgaatgagtaatgttgttgccggcgttgtcagaggtcagattccttacttagaagaacatattgcacagaagaaagcgatttatgaaagatacaaagatggattcaaagatcttcctgtaaagatgaatccatttgatgagaataatagtgagcctaattactggctaagttgtatgattattgattcagatgctatgtgtgaacaggtgcgtggtgaacataaggctttatataaggcagaacatggtaaaagttgtccgacagaaattcttgaaacacttgctaaatataatgttgaaggaagaccaatctggaaaccaatgcataagcagccaatctatgcaatacatggattcgtaactagagaaggtaatggacgtggtaaaactaatgcatatatttcgggtggtgaaaatggaaaagatggaaaaccactagatgtaggtatggatatatttgaaagaggattgtgtttgccaagtgataataaaatgactgctgaacagcaggaaatggtcataaaagtaattaaaggatgttttgaataggcgggtagaaattatgtatagaaattgtttgaaaagagtatttgatttttgctgtagtttgtttgcgcttattgtattgagtccgattcttttagtgttcataattttgggagtggtttttatgaaagggaatcctttctttacacagcctagaccgggaaaagatgaaaagatttttaatcttatcaagtttagaacaatgagtaatgcaaaagacaaacacggaaaattattgcctgatgaaatgcgtttaaatagttatggaaaatttttaagaagtacatccatagatgaactacctgaactgctcaatatactaaggggtgatatggcagtcatcggtccaagaccacagcttgtgagagacatggtttttatgagtccagagcagagaatgagacacagtataagaccgggactgagcggcttggcacaggtaaatggtagaaatgtaatcacatgggaagataagctttcctgggatttgaagtacatagaaaagatcacctttctcgatgatatgagtctgattcttcagacggttggtaaggtttttaagagagcagatattaatcgtgaaggaactgcttcggatatggattttggagattatttattagctaagggtacggtgagtaaggaaggatacgacaggaagcaggcggaagcgaaggaattgttgagaagaaggagggaaatgaaatgaacgagttagtctcgataatcacaccatcatataataccgcaaagtttattggtaagactattgagtcggttcagaaccagacgtatcaaaactgggaaatgattatcgtagatgattgttcaactgataataccgatgaagtcatagatggatacttgagtgatcagagaattaaatacataaaaaatgaaaagaattcaggcgcagcggttagtagaaatcgtgcactgagggaaacaaagggaaaatggattgcttttcttgattcggatgatttatggagtcctaagaaactggagaaacagattagttttatggagaagaatggatatcacttttcatatacaaattatgaagagatagatgaacagaatcggccattaggtgtcaaggtaaccggtccgaagaaggttagtaaacaaggtatgcacaattactgctatcctggttgcctgacggttatgtatgatgcagaagcagttggcttgattcagattagagatatcaagaagaataacgactatgctatgtggttgaaggtttgccaaaaagcagattgctggttgttggatgaatacttaggtcagtatagaaaaggaagaagtggtagtataagtagtcatagtattaagacaatgattggctggcattataaactttggaatgaagctgaagacaagaatgctgtgatgagcgtttggtacactggttggaatttggtgttcggatatttgaagaagaaaaggtatgtggagagataaagaaaatatctcaaaggaaaaacaatttttgtgacagatagtattgtgaggtaagaagatggaaagaaattcatttttatataaagctagaagaaaagctcaggtttttgcacatagaattgtgtcaaatgaagctatgtcaaagttctatttcaaaatagtattggggaaaaaacttaatctggaaaatcctcggacttttaatgaaaagcttcagtggatgaaattatattattatcctaataatcctttagtgatacagtgtgctgacaaatatgcagttagaaagtacatagaggacaaaggatatggagatttactagtaccattagttggacattggaaacaagcggataatattgaatgggatcaactacctaataagtttgtgctcaaatgtaatcatggatgcgcatataatttactttgtggagataaacttacttttgatatgaaagcagcagaaaaacagttaaacacctggatgaaagaagattttggagcgttcaatattgaaattcattattccaaaattattcctcatttgattacttgtgaagagtatctcggtgataacataacagattataaattcttctgttttaatggtgagccaaaattcatatatgtatcaaataatcttgtgcatgatagacaggctcaaattggattcttcaatcttgacggaagcaagatgccattaaaaagagaagactatactgatattgcaaaagttgaactgccagatttctttaatgagatgcttggcgtagcaaaagatttatgtaagggattcccttttgtgcgtgttgattttttcttggcaaacgatagatattattttgctgagttaacatttacaccaagtgcttgtatgatgccattcaacccagataagtatgacatggaatgggggaagatgatagagctagtcggagaatagaatttttagttggtcatgatggttgggagataatatgaaagaaaagagaatttgcgttataggaaatatgggaaatcctggaaacgagaataatggtcagacaataaaaacaaaaaccatgataaaagtactcgaagaaaaatacggttcacatgtttgtattgtttcagatacaaatagagtcaacaattccccatttaagattatattagcaatgattagcgctatgatacatggagatttgattgtgttagcagtatgcgattatgctattaaattactggcgttcccagtgtatattcttgcaaaaatacaaaagaaaaaaataatatatgtgttaattggtggatggttaggtaattttgttaagaaacataaattttcaaaatgggctttaatgagatatgataagatttttgcagaaactaaagtatcaggagaaatgctggtgaatcaaggtttcactaatgtgttatatattgacaattgcaaatatttgtatcctaaaaaaaactatcacacggatcctacagacttacatttttgtatgttatcaagaattgtgcctgaaaaaggtattgaagacgctatagttgctatagcaaaagcaaatgagatgaaagaggcagagacgaattattgcttagacatatatggggaaattggaaacgaatacaaagaagattttgagagactattacaaaagtataatcagtgtgtaaaatatggcggagtggtggaatttgagaaatgtcctgacgtgataagtcactatgatgcattgttattcccaacgagggttatgacagagggaatgccaggaacaatcattgattcaatgtttgcaggaacacctgtaatagcaactaagtggaatgcgtgtgaagaaattattgaacaaggagtaaacggctattattattcaggtggacctgagcagttgttagatgttctgagcgaaagggaacttaaaaaagttttactaggtatgagaagaaactgccttgaagtatctaaacgatttactccagaggtagcttttgaaccattatttcaaatttatgaggaactgataatatgaaaaaagataagatagggataattgttcttaattataatacaccaaatgatgttgaaaaatgcattacttctattcgaaatacttgtaaaatgaactataaaatttatttggttgataattgttcaacagataattctatgagttattttactgatttatacaagggctgtggggatgtatcattaattgcttccgataaaaacagaggattttctgccggaaacaatattggtggtactgctgcaacaaaagagaaaatggatttactattatttacaaatagtgatattcttttcaaagactcatcgatagaggaaatggcatcagtgttgtgtaatacgagttatagtaatgtgggtattgttggaccaaaaatagaaacaccagattctgaaagtgaagagtttgcgagatcaaagttaacgttggcatctttcgtaaaaacaaaaaaaccattttgttattttcgtataaaggctaataaaaaaggtcgataccaaaaaataaagtatgataataataatatctatccatttaaaggaatggtttcaggatgttgtttaatgatgaattctaggttgttttcagaaaataatggatttgatgagaaactatttttatatggggaagaagatgtttgggcatataagttagaaaagcttggactagatgcagcaatatgcggaaacgcttcagtttttcataatcatcataatagtattaaaaagaaaggtttagcttttacacgattttatcagtggctaagtcccctaattgttataagagaatatggaacctactctaaggcgctatttaatattatttgccttataaatattgtgacatgggatttgtgttccattatttctagtgattataggagatttaatcatcaatttagaaagaagattattcaactaatgaaaggttaattatgagcataaagatatcgagaaaacaaataaggtatgcattagtgtttttattcatatggattttggtagggtttaatacagggaatgcagacagcactcagtatgtggcaatgtttaacgcagctacaaacggcaatttttattatgctgagaaaggctttctattgctttgcatgttatttggtaaggctggatttgattatcaagtgtttcttgcaatgtacagttttgttgcgcttgtactaatttcaagttttgtaaaggagaatacgaggtatccagcattagcattaacgttatatggaatttttccgttcttatttgacgctgtacagattcgtaatttaatggtagaggcactgttcttgttttctattaagtttttaaaggaaaaaacgctaaagaacgctataatgtacacactatttattctgttagcagctacacaacatacaattgcgattatttatttggtatttttgctggtatacgtgaaagaaaaaagaaaagtagcattaatatcgattgttggaagtctttcttttgttgttttatacaggacttatcttggaacaattattagcctgtttacatcaaataggcataactatgcgtttgcagatgcggctacatctttgagtacggtaatcaaatattttctatattttggcgtattggttttgattggaatatttgtaagtagaagagaaaagcactatagagcaactctaatgaaacaaaccgttaatggtgtcagtcaagaggatgagttttgggaaaaaataatgttgataagtatctgcttgataacatttataattgtagatggaaattatacaagattatttagaaattgtctcataatatattattgcaggatattaaatgttaatacttatagaacttatagagacaataaaataattattgctgtaattattgcatttgcgatagttgggtggttaatgaattttgctccaggtatatattactatgatacaattacaaacccaattttacataataatattgtatttggatggtttttaaaatgaagatgataaaaaaactaataagcgaaggatttcttaaaatattttctgcttcaacaataaataaaatcgtgaattttgcgtatagttatgtgctgattagggttgtttcaaagagcgattatggagtctattcatatgctgcaacagtttatgggtttttgatgatttttaatattataggtctcgactcggcagctcttcagttgtatgtagaaaatgaaaaaaatgaagcaaggcaaaagacaattttttcatattgttccaaagtagcagtatttgtaaattgtcttatttgtataggtgtgttgtgtttttctagatttattccgttatcaatcaaagggagtaacgaagttttagggcttatgtttttgcagccagtgataaccgcaattaaagtaatgcaacagacatatcttcgagctaatgtaagaaacaatgattatgcagcactaaatataattgattctggttttgttgcaacactatcaattattggttctataacatatggaataagtgggttgatcattagccaataccttgctggtatttcagttatattaattggtagatacaaatataattgtagtatttttgctggggcaaaagagaaaaaatatgaattagataaaaaatctatatatcaaattgcgttgttgatggcagtcaataacagcttagcgacaatattgagtttgcttggaacaacaattttgggaatgattattagtgatagtgaagtgatagcttcatataaggtggcactcactttaccatcagctctgttatttatacctcaggccgtcatgatatttgctttgccttattttatcagacataaagatgactatgtgtggacaaaagaaaaaacaaaacttttattggggggaataggtatatttaatggaggcgtagcgctggtatctatatgtgcggctccaatgataatcaaaattttatttggttcacaatacttagattgtgtacctgtttttagaattctgatgttgtcattctttttccaggcaactttcagaataccagtgtctaatattcttttttctaagagaaaattggaaagtaatactattgcttcaatagttggaattgtcttaacagttggattaagttttatgttagttccaacgcttgccggagtaggaacagcgttggcatatttgattacatatttaacagttgttttaattttggttagacatttgttggttgtgattaagagaatgaagagggcttactatgaatcaaaaggtgtttagtgtaattaataaatttaacattaattcaaaatcaaagcttaaattatataggtgtgttcatttggttacaaattcaatttcgagacagcaatcgaataattttaacattgctttggttccgagtaacgaatcgtatggacatgagttttggttgaagaaatattcaggatggaaaaaaccgattttgggacttattgaacatggattatacctagggaataatcatgaaaaagttggagatgaaatcgaatatgatttaaaagttattttcacctatggaaaatatagggaagaaattttaaaagaagcttttgctgatattaaagtaattaagattggacctcgtatagcatatgcgcgcacagatgaacaatataaaaaggatattaccgataagcttattggaaataaaagaacattgacaatttttcctgcccattcaattacttccttgaaaagcaaatatgacgttaaggatttaatgtgtaaagctcatacaatatgtaaaatgtataatcttgagaatattaatgtctgtttaccgtatggcgatattcaaaaaggaattgataaagagtttgagaaggagaattgccatgtggttagcgcaggttcagattctattagttttttacctagactacgtgcaattattgaaacatcaaccttaacgctatccaatagccttgggactaacttaggttattgtatttatatggggtgtcaacagattcttatcccacaggaaatagaatacgagggaaaagaagaagcaattattgaggaaaagaagaacaaaggtcatgattacgaatattattatcaaagagaaacggattcttttgcagaattatttcatataaatgcaggaatacagatatcaaaggaacaatatgaactttgtgataagttctggggctttactgatgtaaaagagccaaaagaattactcaatatttttgaaatggtacataaaggtaaaatgtacaaataatgatatggaaggaattaaaatggggtatcaactatctgaaaaagattcaaaagtgattgattatatacgtgcgatgagtattgtgcttgttctatttatacattcaaataatgatacatcaagtgcttttgtcggcacaaatattacgccagaactagtctgttcaatagttaaatacctgggctcgcgggtatttggaagggttgctgtgccagcaatgttccttattgcgtcaattttgctttataaaaagggttatacttggaagataaatgttgaaaagaaagttcgcacactattaataccatacatcataataaattgtgtatggattctattctttttaatagcacaaaggatacctattttgtcaagctttttcatgaacgaacaatacaggatatcaacttgggggagcgttcaatggatcgatgcattgcttggtataagaggtgaacccttagtttatccgctttggttcgttagagacttattcttcttaaatttaattgcgaaaccaataaaaatgattattgataaatttccaatatgcattatgattatcttattgtgtggttgggttaccaatgttaatacacacatttttttctgttcaattcaatcactgtttttttggtgtgccggttattatattgtaaagaaaaattatcattcagatatatatcagaaaattaaaatgaaaacagttattgcagtgtatttcggactggtagtattggatgtttgttctattggtatcacaagttataaatatatccaccaagtatgtactttggtaggtttggttgtatttgtcggaattggtgcttatatgacaaggcgagaaagttggttgttacaaacaatatcaagatatagttttgggatttttttatttcacgaattgctgttaacgacaactaagaaaatcgttaatgctatatttggaagtggatggttgtggggaattgcaacatattttattcttccaatagtcattatcagtatatgtattttgttttgtatcttgctagagaataatgcgcctaatatttattcgattttagttggtgggagaaataaaggaggaaaaaaattgtgaacatactagctattattccagctcgagctggatcaaaaggaattccaaataaaaacatacgaattattggtggtcatccactaatttattattcaataaagaatgcagttaactctcaaatgattacagatgtaattgtttcaactgattcaccggaaatacagattatcgcaaaacagatgggagttaagtgtcattggcgcgacgaatcgttatgtggcgatgcggtgacattggatgccgttatctatgatgcaattccaaaggatgatgaatgggaatatattgttacaatgcaaccaacatccccaacactaacggttcatactttggatgcaggtattaagtatgcgattgatggtaagtatgatactgtgatttcggctataaatgcaccgcacctttcatggggagagaatgaaggtaagatagtgcctaattatactgaaagattgaatcgtcagtatttaccagcatgctatagtgaaacaggagctttctttgtatcaaattattctgtttgtacaccaaagtctagatttggtgaaaaggttagtgtttttgagattcctgaagaagaatctatagatgtggacactttttcggatttacaagcggttgctaatgttttaaatagacaaaaagttgcaatctatgttaatggcaacaacatgcgaggaattgggcacatttatcgtgcgcttgaaatggctgacgaattctatgttaaacctgatatttattatgatttaaatcagactgacccaaaagtatttggtaaaacgactcataatttaataccggtcaatgggattgctgaattatttgatagatgtaaagaagaagaatatacagtatttattaatgatattttgactacatcaattgactacatgattgcgttgagaacagtgcttccggatgcaaaaataattaactttgaagatgacggagaaggaattcttaaggcagatttggtattcaacgctttgttccaggaaaatacattgcctcaggttaaagcaggagagaaatattatatttctggtaagacattcatgttttacgagccaatccagattaaagaacatgttgaaagagtatttatctcgtttggtggagcagatccacagaattactcggacagattgcttgaaattattaagaaggatgaatataagaaatatcattttgtcgtggtactcggaagagcgaaatataatgttgaggcgcttatggagtataacaaatatgaaaacattgaagtcctttatgacgtttcaaatatgccagaacttatgtcaagttgcgatgttgcggttacatcaaggggaagaacgggatacgaacttgcgattcttggaattccagcaattgccatggcacaaaatcagagagaagaaaaacacggatttgtttgtaacgaaaatggatttacatatattggattgaatccgtctgatgagattattgaaggtaacttgaagatgtatctcgaattatcaaagaatagcagagataagttccataaaaagttgcttagccatgatcttagaggtgggcgaaaacgtgtaatgggattaataaataacttataaaaacggaggaaaatagattatgagaaatacaaaaccatatatgattgctgaaatgggtgtgaatttttatgatacagcaaaggcaatggggatatccccattggatgcagcaaaactttatattgataaagcagcggaagctggagtagactgtgctaaatttcagtcgtataaagcagacaccattgtctctaaaaattcacctgcatattgggatttaagtaaagagcctacaaagacacagcacgcattatttttgaaacatgaccattttggtgaggaggagtataaggaactttgtgattatacacatgctaaaggaatggattttacatctactccttttgattatgcatcggcagattatctgtatgatatggtggatttctataagatatcttcttccgatctttctaacattccatttgttaaacatatcggacgtaaagggaaaccagtgtatatgtcagttggagcggcttacttatcagaagtagatgaagcagttcgtgctcttaaggaagttggttgcaaggatattgttatttttcattgtgttctctcttacccaacagatcctaaggatgcaaatttaagaattattgaaacattaaagaaggatttcccagatgtaagagtaggatttagtgatcatgttgctccagatgatacaatgatgactttagcagcggcatatatgcttggtgcagaagtgattgaaaaacacttcactcttgataaaacactttcaggtaatgatcattatcatgccggtgatcctgatgatttcaagaaagctatggataattttgtatggattgataccgtacttggttcagatgagaaagttgttttggattgtgaaatcattccaagaagagaagcgagaagatcacttgtacttacgagagatatgaaggtcggagaagtaattaaggctgaagatcttatgccaaagcgtccaggaactggaatctctccccaatttacagatatagtgattggaagaaaagtcttaatggatttagaagaagatactgtacttacatgggatatggtgtaaagcagttcatcggacttgttttatataagccaaaatgcagcagtcttattgtaaaataataggtatgtaggttgttgaaaaaagagaacttatacaaagctaacaacttaaagtcatatgatttgaatatctcctgacggagattccaaatcatatggaagaaacagaacgatcatttttagaagaactgttatcatggtctccgaatttaccggagcacataagaaaacaaaaatagaaatttgcagcaagccgcgaaagcggtttacagctgtcaaggtactcgctatcatgcgtttactatccagtagctcgattagttcaatagcatttagcgggacgtattctcattcagaaagaaattcaaccctttacttgtagtgaatcttgggctttctatggcaacttagtaggttaagtaaacaatcaggtggcgaacaacaatgtggaaaattcatccaatcataccaataaagtaggtaatccttatgacgcaatatacatcgggccaatttgcaaaacttgcaaacgcgacccttagaacaattagatactatgacaaagaaggtttattaaagccttcttttgttgcatctaatggttttcgattttataatgacaatgatctgatcaaacttcagcagattttactcttcaaatacttaggcttctccttggcagaaattaagagtatgaacttgaatgatgtagatccgctcacactgagtaatgcgttgtttgtgcagaagaaaatggttgaggaaaagattggataaaaagatttgatagttctggctcatttaaaattgatgacagtcgtacagatgaagaaaagagactgctacagttagaaaaagagaatcagcaactacgaatggaaaatgatattttaaagcaggcagcgctgataatgggacgaaaataaaagtgattttagcgaattgatataaatacagtatcagtgctatgtgtaagttattaaaaatatcaagatctttaatttactaccgtcctactcaaaaaacaaaggataataaagttattaatgctatcttgacaatatttaaagatagtagaaataactatggatctagaaagattaaagtagaattatcaaagtcaggatatcaagttatcgttcgaaaaattcgtcgtattatgcaagaaaatggcctggtttctaactatacagtaaaacaatataaagtacataagagtacatgtaataatgataaagtagaaaatatagtacatcgtgaatttgatagagaaaaaatattagatgtagtagtaagtgatcttacctatgtaaatgtagatggttattggaattacatatgtttactactggatttatataatcgagaaattattgggtatgcagcaggtaaacataaagatgcaaaattagtatacaaggccttcagcagagtacaaagaaacctgaataatattcaaatatttcacacagacagaggaaatgaatataagaataggataattgatgaagtactagaaacatttaatattagtagatcattaagtgctaaaggatgtccctatgataatgcagcagctgaagccacctataaaatcataaagacagaatttgcatttaatagaatac

SEQ ID NO: 225 - DNA, 63192 bp, Thomasclavelia ramosa
  source 1..63192: mol_type = genomic DNA
ataggcttatagcctcagagaaaaccacgtcttttaggcgtggtttttataattaatttgaaaaagattccattgtaagatgcaattactaaagagacaggaggcgatgatcaatggattttatttttaatatcaatctaaaaaagaatttattaacaaaaatgaattaaaaccgtgtgaattgatttgtaaaggtttaacaaagatttaaagattatcgctaacagaaatattaactgaagaaagttactaaaacaatgattttgttaaaagtaggatattcaggttatgcagaatttaaatatgattgcgttaaatatgtaaatagcttaaataatgctaaagataccgttaataaagagaataataagattgaaaaaatatattgatacaatcgaattgatgcattataccttaatgataaaatgatgagaaagttagccgttttagtaaaataaacaagaagagttcgctgtgttggagaggttaatagcccgataacctgtttgcaattgatttaattgctaataaagaagatctatttttaatgatttcagttactggtaaaagcgatacaataaggtctttaaaaggttatcacagtctgcacaatataataaaccatgaaatatatttttataaatctttcgttttcgttttgaacgtacttccttgctttctaattttgcttgataaatacagaatatcttttcgtctataattatttcatgatgatgtttaaagatttttcatttctctattggaagtttttgatactcacctctagttttgaaatattcccttttatgaagaattaaatttctaagataagttgcattcattaaaattctacacatatagggattattccatacatcagtatacttacttttatcatctatttcattctttaaactaaattcatgtaaagaaagagatggtgttggaatgtttctcttgttaaagtgtgagcaatttgtaaggtaccatagccatctccatcaatttgaaaggtatgttttacaacattagcattaactggattagtcactaattgagcgcttttttcactttacggtaccccaaaggtggtgttgaattattaatttacgtgggaattaatgcagttcaattaaatggcgagggctttattgcacgtattggtcaaggataattactattggaatttgacatggataagatcaaggctgcgggatattcattagaaacacctgtcttaataacaaatcatactgatttaaaagagataaaaaatactaatgaagcggtggtttctaatgatgtagaattaattaaagttgaattttaaaaagatgagactatagtttttagtctcatctttttaatgacaacatttattatcgtgttcatgacaagcgtgatgaccatcatcatggtgattacaggctgtgttaggatcgtaatgcaactcaccctttagatagtcgattactgcttcatcactactgccaatgaccccaggaatgatttcgattcctaatgatgtgaggatatttcgtgcacctccgccaattccaccacaaatcaatacatcaatgttaagattttttagaatttttgctaaggctgaatgaccctgaccgttagtactttctatttgactagagataatttcttgattctcaatgtcgtatactttaaactctttactctttccaaaatgttgaaaaatattaccatcttcataagttactgctattttcattctgttatcctccatttttcttttatttttaattgtacaagatgaagtgcaattgactaagtgagctttgtcacaaagagagtagttaccaccttcaatttttaaagaatagccccggacaatgctttgagcaagcttataacgtgcttgttcataaatactctgaacggttgttcgggcaacatccatttgtttagcacattcttgttgtgtgagtccttcaagatccattaatctaattgtttcatattcgtcgattgataggactactgtttttgtagctgacgggtttggaccaaaatatgcatatctaggtaatctgcatacttttctttttcgacatggtcttggcatagcttcaccacctttgttattgacatatgtcaataacattataagctaatattataaaaatagcaataattaaccactatccaatgattctttattaattttataataagtgatatactctaaacgagtaaaggaggttttaacaatgataatacgtaaagcaacaattaaagatttaaaagcaattacagctgttgaagccacttgttttccacctgcagaagcagctagtcggagtaattttaaaaaacgtttgaaaacttatccgaatcatttttggctattggaagatgaaggaaaattgattagttttattaacggaatggtaacaaatgaaacaacgatcaatgatattatgtttgaagatgctagcttacatgatgaagcaggagaatggcaggcaatttttggagtaaatacaattcctgaatatcgtcaacaagggttagctgccaaagtcatgcaggtggtaattgatgatgcccgtatggcaggacgaaaaggatgtattcttacttgcaaggataaattattgcattattatgagaagtttggatttaaaaattgtgggatttctcagtcaatgcatggtggtgctatctggtatgatatgcgtttagagtttgaacatgaatgatttagtaaatcttggtaagtttattagtttgattttacgacataaaccggaactaattggattaaagctagattatcatggatgggcaaaggttgatgagttgttgttaggaattaataatagtggtcgttttattaatcgaacattattagatgagattgtcatgacaaataataaacagcgatatcaatataatgaagatcatacaaaaattcgagctaaccaaggtcattcaatcaaagtagatattgaattaattgaaaagattccaccagaatatctttatcatggaacggcatttaaatatttgaacaagatagagcaagaagggataaaaaaaatgaaacgtttatatgttcatttatcgaaagatattgaaacagcatttaaagtcggaagtagacatggtaaagcaattgttttagttattgatacaaaggcaatgtgtgaagatggctgtaaattttattattcccaaaatggtgtgtggttaactgaggacattgattataaatatgtaatggaagtaattaagtgatggttaataccattgctttttattttctatgttataataataagtatgaggtggaaaacgatgaaagaaaactttttatggggtggtgctttggctgcgagtcagtgcgaaggtgcgtataatctcgatggtaagggattaagtgttagtgatgtaatgcttgcaggaagtaagacaaaaaaacgaaaacggactgatgggattgttgctggagaatattatccaagtcatgaagcaattaatttttatcattactataaagatgatttacaatattttaaagaaatgggctttaattgtttgcgagtgtcaattgcttggtcacgtatctatcctaatggtgatgagctagagccgaatgaaaaagggttgcagttttatgatcaattatttgatgagatgttgaaactagatattgaaccagtggtcacattatcgcattatgaaatgccttattatttaagcaggcagtacaatggcttttttgatcggcggtgtgttgattattttgaacgttttgctattacatgtttcaaaagatattctgctaaagtcaaatattggctaacttttaacgagattaatggaatgatcaccaatccttatactggaggtggtgtgattgcaaaaattgataataattatttacaaaccgttttgactgcatgtcatcatatgttcttagcaggagcaaaagcggttaaagcttgtcatgagattattccttctgctcaaattggctgtatgattgccttcttatgtggttatagcgctacatgtaaacccgatgatgtaatgtttaatcataattttatggatgtaaatatgttttttaccgatgttcaggtacgagggagatattcaaataaagcattgacatggatgtcacgttatggaattgaattaccagtcatagatggtgatgaaaaaatcttagaacaaggaaaagttgattatattggttttagttattaccagagtattacgatgtcaagtgatattttagataatcttggaagtggcggaaatctttttagtggagctaaaaactcatatattaaagtaagcgaatggggctggccgattgatcctaagggacttagagtttctttgaattacttatatgattgttatcaaattccgttatttatcgtagaaaatggactaggagcagtcgatgaaattagtgacgatcatcaaattcatgataattaccgaattgattatttgacgcaacatgttcgagaaatgaaaaaagcagtagacttagatggagttgagttgcttgggtacacttggtggagtccgattgatattgtaagctattcaactggcgaaatgaaaaaacgttatggatttatttacgtagataaagataatgatggaaatggtactttaaaacgttatattaaagattcattttatgtatatcaggaaattataagaacaaatggtgagtgtgttgatgaaaaaaaacgttatactttaaatagtcaattaaaggatgttttggaaataaaagggcttagagaaattattaaattagttagtgaaggaaaagttactgaccttcaattaaaactagggggacgcttaaaaataaatcaattacttgataaatttgatgttaatgataataatcaaagattgattatagatttactgaatcgtttagaggctaaataatgaaaatgtccggaataattaaccggacttttctatttattcaataatataagcattaatgatttggccataataagccgtgtgtaaatctttatttgctccatagaatgaactatcaacatcttgaggataaaaacgttctaaattgtttggagtaattgcatttttatcttgtacttgttgatagacaattttacattcaagtgtcaaaggaagctctttaatacctggaactgatattttatcaggatcttctaaagtaggcccaagttctttaactttatcaatatctcttcctgatttcgtaccgcaaacccctaagattttcttatcaaaagcacctaaaggaatattgattgtaaattcaggattttttctatctgttctttagtgaaacgatgttctcttacaaaaacagtaaataattctgttgctcattcaattcctaaggttccccaggaaattgtcatactattgactttatcatcaactttagctgttaaaagaacgccagtttgaacggcttccataatttctttagcataatcaaatacatttatttgttttttcatctaattagcctccttgttattttaataactatatgataaattagaactaaattaataacaagtatacacttttaagtaagatactatctaaaaggagagtaaaaatgaacgatgaagtaaatgtaagaccatttgcatatgcaatgtctttgatcgatggcaaatggaaaatgcacatattattttggttatggaaaaaacaagtactacgatatagtgagttaaaacgtgcattaggaacaattacacataaaatgctaagcactcagttaaaagaattggaaaaggacgacttgatcattcgcaatgagtatccgcaagtcccgcctaaagttgaatattcattgtctccacgtggtttaacattgatgccggtgttagaatgtttatgcaagtggggacatgaacacattaatgatggagataatcatggataaagaatattattcgataggtgagattgcagaaatttgtaatattccgatacggaccttacgttactatgatgaaatcgggctattagtccctgaaaaaagggatattgaatcaagctatcgttattacgctagacatcagatattacaagctaatattattaatcaatttaagattcaggggtattcaattaaagagattaaacatcagcttgcaaataattccgtttctttgagtgaagaaaccttgaatcaaaaacatgctgaattaaaaaaaacaatagctgaattaaataaattagagaaacgtttaggattctttttggagtgtctaaagtatcaagatcatcagttgcatttacaattaaaggaaataccggaaatttatattgcttatgttcgtcaacaaggtttagcagaccaagaagcctttatgcgtcgatttagtgaattaaatactttatgtcgtaagaataatttagagccgataggaaatataatggcgcgttattatgatgattatcaacaatatgatcccgattgtgctgatgttgaagtttctattcaaattgatttaaatcatgaaattggtggagtagttagaaaagaacctggttatttatgtgtttctgctcttcattatgggccttatcgagatgaatataagacttatactcttatgatggaatggatgaaaaaaaataatttagtaatgtgtggaccagcattagaatattatttaatagatcctatctttactaatgatgaaaatgaatttgtgactgaattaagaattcctgtaaaaagcatttgactctctagttactagaggctttataataaatttgaggtgattagatgatacatttagtatatttagacaataaagaaaaagtcttagaaaagattatgagtggcaaaaaaacaatgataattcgaggagcagcaggacgcaagattcctcatagtagagtattcaatgacgaagtattatatttcatggaaaaaggaactaaaaaaataacagcaaaagcaagagtagttaacgttttaaattttattaaattaagtgaagatgaaataaatgaaatattattaaagtatcaagataaattagatttaacgccaaaacaacaagttcgttggcataaaaaatgtttgtgtttagttgaatttacagatgtagaagcaattaaaccactagattttgatcatcaggggaatatggatgattggttgattcttgatagaattgaagatgttgtagtaggaacgagtatcccctacaactataataatgctagatttaagtaaactgccggaagggtagttttttttaagaaaatttttaaggattattaataacaataaattggtaataatgatagaataagtcatattgggggtgtaaaaatgaaagataaattaaaaaactttaaacatctcttttttaaaatcctaaaatttgagattttctataaatttgcaatattcctaattatcagtccattgattaataaaattcttcaaatatatttaaataataattccagcggagctgcatttaaccaatacatattatttaatttcttaaatcttgaagggattacagttgttttaattattatgatgatggcagtaattgcaattggatatgaatttagtgtactgataaatatgattactttaaataagcaaaataaagattttcgaatttatgaggtaatgaaaacctcgttattaaatttgagttgtttaaagcatcctagcagtattttaacaggaatattctttttatttattttaccattagtgcatcttggttatataaactcattgataccaagtttaaaaattcctaattttatttttggagaattgagcttaacttttcaagggaatattttaatatgtttaatctatggattgtattttggaatttatggattaatgttttttgtaccggttttaatgattttaaaaaaagaaaatattattaaagcctttaaagaaaatataaagttccataaattattgacattaaaagaacgtatttcattaattggaataatgggtatttggatcgttcttgagaatggattaattcaaatattaccagatgctttaataaaaaatgcggattttaatcgttattttttaaagaatttaattatttcttcgagatttagaatttatttattggaatacatcatatatacattaataatcatggtcttgatgattgttttctatcaatatttaataggtgttatgggtaagcacgagcctgaactattgaaagtaaaggtggatttagaatttaatcgcttatttgaccgaactttattaaaagcacaaattcatggtaatcgtttttttcaaagcttggataaatatttttttgaaacacatttttatcaaaagtatcgtgggatgatcaaccttgttttttggccctgtatgtttatcttgattacttatctttttcctaattcaatatatattttatcagctatcttaattgttgttttgttgatgtattttgctgctagtattattattcgttatgaaaaaagaaaaaatggtcaggaatttgaagatgatagtggtttgctgtttttgccttatcgcttaattaaacgaactttaaataattctcgcttatataatcatcatcctagaatggttacagcactcttagcttttatttctgtttgtctagtaggtatgtatttagaacaaccgttgatgctccatcatccatgggtaatcggtcatcgtggttcaatttacggggttgaaaatacagatggagctatcatgacagcagctgataaaggagcggattatgcagaaattgatgtgcaattatctaaagacggggttcctgttgtgattcatgatgcagatttgtcgcgattggcacataaagatgaaaaagtaaaaaatatgactgctaaacaattaagtgaaaccttggtttatcataacgaatacactgataaaattccgacgctagatcatttgattaaaaagttaaaaaagaatagcactaaaatgggacttttgattgagttaaaagttgagggcggtaatggagaaaaactagctaaaaaaattattgatgttatagagaaaaatgattatcaaaagcaggctatctacatgtcgcttgatttagatactgttcaatatcttcaaagtcagcgtcctgaatggtggattggatattgtatttatggtagtgctggagatattgaaggatcattatggaaccaaggtatcgactttttggcgatagaagaaaatcgagctacagtgagttttgtagaaaaggctaatcgtaattgggttcctgtttatgtatggacagtagatgatgaaagtaggatgatacagtatcttgaacttggggttagtggaatcattactaattatcctaatcgggggagaaaagcagtcgataaattcaaagagaataattatcagtattattatcatcatgggtcaggatatcctgatagttaaaactagattgcgatctagttttttttctaacagttttgtaaggttggttaaattactaggctatcttaagaggcgatagtataatgaataaaaggagttgaagagaatgaaaatcatgatagttgaagatgatttgatcttggcgcgtgaattgcaattattatgtgttaagtggaattttcaggcaaagtatcttgaggattttaagcatgtagatcaagtatattgtacatatcagccggatttgattttattagatattaatttgcctttttatgatggtttttactggtgtcaaaagataagggaaaattccacagtaccaatattatttatttctagtcgagagcaaaatgctgataaaattctggcactgtcagctggaggcgatgattatattgaaaaaccatttgatttagaattgctgttggtgaaaataaaagcaatattgagaagaacttatgaatataaacatttggaaaaagaatatcttgatgaggatacctcttatgatattgtgagggggcgatttgtatatcaaaataaagttttagaattgactaaatcagaaggtaagataatgtcgacactattagggcaacgaggcaactgggtaaccagggaacagttgatgatgacattgtggaatactgatgaatttgttactgatgcgactttatcggttcatatttcacgtctacgaaataaattaaaggaattaacgaatggaaaagatattattaagacgaaaaagggagtaggttattatattgattaattatttaaaagagaaattacggcctattgtaggtggaatgttagttttagtatttattaatatttattttttatatttgtgtggtagtcgcttatatttaagtgatctggtttatttggatgttattttaatttttattgggattacgatctttatttatggaaatgtgaaataccgagcagttgaaaaaataatgaaaactaataattttttgaccacaaaggaattaaaaagctatttatcgttgcaagcacttagtgttattgagcaaaacgatttatattatcatgaagaaattaatcacttaagtactcaaatacaagaattatcggattatatttctagatggtcacatgaagctaagttgccgattgcttcaatgcgcttaatgaatgaacgtaatcaagatctagttttaaaaaaacaaatgcgtttaactattgaacaaattcaattattattaaatacaatgttaatgtctagtaagcttagaaatcctgtgaatgatattaaaatagagaaagtttttttatctcaagttattaaggaagcgataaaacatcaatcttatttcttaattaatgatcattttaaaattaatttaaaggtagagaatgagtatgtttatagtgatcggcgctggttaacatatatgctggaccagttcattaccaactcgattaaatataaacaaacagaaccaaatttgactttttatattagagaagatcatgatggattagagcttattgttgaagataatggaatcggaattgcaccggaagatgctccatatatatttgaccgtggctttatcggtcataatcttcgtgatggagactatcgctcaacgggaatgggtttatattttgttaaagagatagcagagaagttaggcattaaagttatctatgataatactttttgctcaggaagccgctttaaattacaatttgaagataatgcagaatatttcatgctagattactaaaatgtaagattatagagctaactgttagataagcgttaggattttttcttgattagttggtaaactttagttgtaatctaaggaggaattaaaaatgagaaagattgtggaaataaaaaatctcgttaaaagttatggtggtaaagattatcagactaaagtattaaaaaatattaatttagacatttatgaaaatgattttattgcaattatgggaccttctggagcaggtaaatcgactttattaaatatgttatcaactttagataaaccaactcgtggtgaaatcattattgatggtgaggatattacaaaggttaataataagcggttgtcgaaaattagacaggagaaaattggttttatttttcaagattataatttattagataatatgactttacaggataatattgctttaccgttgagtttaaatggaaagagaagccgtgaaattattgaaaagactaaacagatggcctctttatttggattaagtgaacatttaaataaatatccttatcaattatcagggggacaaaagcagcgtggtgccagtgcacgagcattgattactaatccacggattatttttgctgatgaaccgacaggagcattagattctaagtcaagtaaagatttattaatttctttgaaaaaagcgaatgagtcaggcaatgcaacgattttaatggtaactcatgatgcttatagtgccagctatgctaaacaggtttatatgcttagtgatggagcaattaaatgtcgcttaaatcatagtggtgagcgacaaaagttttatgatgaaattttaagcttactagcttcgatgggaagtgaacaagaatgagtttatttaaattagcttattcaaattttaaacgcagtgtcaaaaattatgttgctttgattatttctttatcgttttcaatttttacgttttttaattttcaaaatattgttttttctaatgcgatggatgttttaaaagaaaaaaacagtgattatattgcaattattattcaagttatttctattgttttaataatttttgtcttcttttttatctggtatgcgacaaatgtttttttatcacagcgtaaaaaagaaattggaatttttacttttatgggactggataatgtaaaaattggtaagatgtatgtaattgaagttgcgatgattggacttttatcattaattattggcctagggagtggagcgcttttttctaaactttttacaatgttgttattacgcttatcagatataagcgtggatgtttcatttagttttagtattattcctgtattactgacaatcgctttatttgtcacgatttttgctattatgattattaaaggctatattaacattttaagaagcagtgttttagatatgttatcagcatcaaaacaaaatgaattacgtgaagaaaaaataattattactttattaaaagtggtaattggggtagttttgatttgtggtggctattatgctgcgatgatggttggtgatatgtcttcgtttatctatatattttatgcagtagttttggttgttgctggaatctattttctatataatggggtaattccgtttgtaattaaaaagttagctcaaaacaaaagttatctatatcaaaaagaacgctcattgtgggtcaataatttagcatttcgtttaaaaaagaattatcgtgcttatgcaatggtaacgattttaatgatttgttcggttaccgttttagcaacctcatttgcaatgaaacaacgctacgataatatcagtcattttagaggtacttatacttatactgtgatggcaaataaagctcttgatggcaaacaaattgctcaaaaaatcagtagtaataatgagctcaactatcataatagtctaaactatattgccttaaatgcagatatggttaaaagtaaatatctatataatcagtatggtgtagtttcatatagccagttaaaaaaagccgcaaaagaggctaaaattaaatttgatataccaaaattagatgatcagcaagtagttaatttgacgagattatatttacttgatatctcagatcctgaaattaatccggtgatagaaattgcaggtgaaaaatatcaaattgttgatgaaactgcaacatcatatttaggattattgcaagaaaatattagtacctatattgttagtgataacacatatgaaaagttaagaaattttggacaagagttttatatgtataactatcaaataaaagatcctaataattatcaagcatcgattgattatttaaatagtttggtaaaagatggacctgtagattatgtgagttatttagccaatgatcctaatggtggggatattgcttgggttcgagtaatgtactctatttgtattttcttgtttttagtattcattttagctagtggaagtatcatttttatgaaattgagtaatgaggcttttgaggatcgagagagatataatgttctaaaaaaactaggaatcagtaaacgaacattgagtaggtcaattagaaatgagatacgttttgcttattattgtccttttgttttgatggtactgtcctcatatttttctgttcatgcgctagctaatgttatgaagacagaactatacactgtaaatattgttagtgctatcgttattttagtaatcttttatataatctatactatttcagtattaatgtttaaaaagaaagtattgagtgatcattaaataaaagcaggatgaagtttaatttgtcctgttattttttactaataaagcacttgcagcaagcaagaaaagaagatacaagtaaattatatttggctattgaattgtagaaataaaactaggggtttaattacataattattatatttaataattatgttgataagctattaagaaaaaacgttgaaataatagaaatatggtataattaaacatattaacttgttaggaggttaaatgatgaaaaaaaaatcaggtattattgaggaatttaagaagtttataactcgaggaaatgttatggacatggctgtaggggtcattgttggtggtgcttttacaacaatcgtaacttcacttaataatgatattatttcaccgattttagggatttttggcggagttgatttttctgatttaaaacttgtcatggggagtggtgaaaatgctccagttttaaagtatggaagttttttaacggcggtgattaatttcttaattatagcaatgattattttcttaattgttcgtgcaatgaataaaattaatgaaagtatcaaagctaaattgactgacaaggaagaagtgctggttgaaacaacaaaagtatgcccttattgtagagaaaaagttgcgaaagaggcaacccgctgtcctcattgtacttctattctagaagaaaaagttgattaagcaggagttgacatgaaagatattataattaaaaatgcgtatcatggtaatttaaagaatcttgatttgacgattcctcggaataaattagtcgtaatcactggtttatccgggtcaggtaaatcaactttagcaattgatgttctttatcaagaatgtcagcgacagtatttagaagcaatttcttttcaaggaattaataaaccaggagtcgaagtaataagaaatgtttcaccagcagttgtaattacacaggatgaaaaaaataataatcctcgttcttcactgggaacagtaacagatatttacactgatattcgaatgatttatgaaaagctaggagttcgtaaatgtccccactgtggtaaaatgattgatgcatcatactgtcatgaagaattagttcgagctgataatgattttactgtttatatgtactgtaattattgtcattataagatggaaaaattaacaagatcacatttttcttttaatagtgaaaaaggtgcctgtccaacttgctttggattaggtaaaacattaatacttaatttagataaagtacttgagccaaacttatctcttcgcgagggtgcagttgcattttggcatcatcgttataaagaatatcaaatcgaacaattagaaaaagtatatcgagaactggggctttcagtgactccggaaacaaaagtgattgattttaatcagcagcaaagagtgatcttattatatggaactgaatcaaaacagtttaaggaactttttggtaaaataaaaataagtaagtttgaaggaattataactaatttatggcgtcgggttgaagaaaagaaaaatcaaagtaaagaaataagcagttatttcgatgaacaggtatgtcctgattgtcatggtgaaaagcttaattcattaagtcgtcaaattacagtgaataaaacagttattacagcaacaacaaaaatgcctttgacggaattactacattggcttgagcagctggaagctactgtttcaggaccacaaaaagaagctgtccaacaatatataattgatttaaaaacaaaaattcaaagaatcattaatgttggtttaggatatttgcatttagatcgtcaaacaatgactttatctggcggtgagaaacaaagaattaaattggcagcggctttacaaagtcagttaacggggataatttatatttttgatgaaccaacaatgggattacatcctaaagatacagcaggaattattaatgttttaaaggagttgcgagatcaagagaatacggtgattgtaattgaacatgatttagatgtaattaaagcagcagattatttaattgaccttggacctggtgcaggaaagcatggtggtcaaattcttgcattaggaacttatcacgagttgcaaaataatcctagttcaataactggacaatattttgttaataaaaagaaatgtaaaagagtatatcgaacaagtaatcgatattttgaggtgaaaaatgctcatgttcataatttgaaaaatattgatgtaacttttttagttgattgtttaaatgttgttaccggtgtatcagggtctggtaaaagtactttggtgtttgctgtattagctaaacagcattatcgatattttgatgatattattgctgtcagacaagaaagtattacgacgacaaggcgctctaatattgctacatatacaggaatttatgatgaaattagaaagctttttggaagtttagaagcaactaaagaaatgggttttacggctaaacatttttcttttaacagccaaggaggacgttgtgaaaattgtgaaggattaggaactgttactagcaacatgttattttttaaagatgttgaggttgtctgtccagcttgtcaaggaaaacgtttcattcctgaaatccttgcattaaaatatcatgaacattcaattgatgatgtgcttcatttatcagttgatgaaggggtcggtttttttagtgattgtcccaaaataattaaaactttaaaaatgctgcaagatgttggtttagggtatttagaattaggacaagttttaacaacgctgtcgggtggtgaaaaacagcgtttaaaattggcaacgacattactaacaaacataaataaacataatctttatttaattgatgaaccaacaattggcttacatcctctggatattgagcatttactacttttgcttgatcgtattgttgatagtggtaatacagtagtaatcgttgaacataatcagcagattatcaatgctgctgactggatcgttgatctggggccagcgggaggaaatgatggtggttatgtaattgctgctgggacaccaaatgatataaagggtaatgagaattcaataattggtgaatttttgtaagaacttctacgaagttcttatttttatgcatattatttgcttatgcaatagctctgaggtagaataatgtcgaaatataacagtgttatattttggaggtgactatgactacacaagaaaaaattataaatgttgcgactcaggagtttttaaatagtgggtatcttggtgcatcgctaagaaaaattgccaaagcagctcatgtaacaactggagcaatgtatggatattataaaaataaagaggcactttttaatgatattgttgaagaagtgtctgaggaatttaaaaatgattatttggttgagggaattaatcttgagacgattgattacatttatcaaaattttgaagtttttaaattaatcatttgctgtagtaaaggaactcgttatgaagaatatttagattgtttagtaaatgaaaaaacgaagcaatttaatgaacatggttttgatgataaattatcacatattattaatcattcatatttatttggtgtttttgaaattgtccgtcatcaaatgactgagaaacaagctgaggattttgtcagtgatttacaagaattttatcaggcgggctggaataagttattagaaagaaaggaaatataatatggaaacattaattggaatattgattccgtttattggaacgacggcaggggcagcgtgtgtctattttatgaaaaataaaatgaacgatttagttcagaaagtattattaggatttgcttcgggagtaatgattgcagcttctgtttggtcactattgattccggcgatggatatgtcaagtgatttgggaaaaatggcgtttgttcctgcagcagtaggttttctattaggaatagcttttttgcttttacttgatcgtaatgtacctcatatgcatttggataatgaagaagagggtcctaaaagtcaattgaaaaaatcaacaatgttagtcttagcagtaactttgcataacatcccagaaggaatggcagttggagttatttttgcgggattggcatctggaagtcagggagtaacttatgcgggagctttagctttatcgctgggaattgcaattcaaaactttcctgaaggagcaattatttcaatgccgttaaaaagttctgggttatcaaagaacaaatcatttatatatgggatgctatcaggtattgttgaaccgattggtgcaggattaactattttgatggcttcattagtagtaccgattttaccatatctattagcatttgcggcaggagccatggtttatgtagttgttgaggaacttattccggaggcttcacaagggcatcatagtaatattgcaactattggttttgctattgggtttgtcgtgatgatgatgttagatgtcgccttaggttaatctttacataatcttaagcacagttgtatagtttcgtttctgtaattaagtaaaatgaggttaaagaggtgacagaaatgaaaaagagattagggttaggtttgggaatgtttttaataacaattttatctaatttgtcaggagttatggcttatagtggtaatagtaatttaccgggaagtgcaataattattgtttttgtaccggtaatgttaggaattatctatttagctagtaagggtgaggttaaataactaaaactttacatagaattaaagcagggatgatataattttaaatgagaatattagataatttagctatggtatagatggattggttataaaataatgctaagtcctttatgcacactataaaattttgattaaaagactaatcatatcttatacctgctctatttgaataactttccctatgtatatgaaagatgaggcaacagcctcatttttcatatttcataaattccaaaatttaacattttgttaacaaattgatgatattattagtctacaaaataagtattataaagataaggataaacatatatttagtaaggaggcggttttaatgaacaaattagctttagttgcgataagtttatttgtagttgtagaaattctagttggagattgcgtagtccagggaattcctctttgggtagttggtttaattggttttagcctaatttggatgggaataatttgtgtaaaagaaaaagtccaaatcaaagactggtattaaaaaaaggaaattatgatttcctttttttatttatgtttaaacatttcaaatgatgaagcaattaataaaaatagcatacctgtgtgtacccagaaaattgtataatcaagaacaccatgtaatagaataactgcaatgcatgaaattacaagggcgacataacggagatttagcttttcttgatagaccttaaataatcttttacaattatcaaacatataaggaacaagagtagcaacgccaacgacaccaaatgataaaatcggatcaagatagacgctgtgagcatgttgagtgacatgaccaccatactgtttaaaaatcatcatatatgtcattgggccttgaccaaagagcggatgggctttgattccttcaattgcagcatgccagatctttgttcttacagtaaagttatcaactagtttttcaattcttgggaactgttcaggattaaagataaaataaataccaccaatgatacaaagtagcccaattaaactgcaaatccggtaatttttattgatgatcaagaatactaacattgctccagcggttgcaacaaaagcggtacgacatccagtcatatataataaaaagaaattaaggcaggcaacgataaaataataaagctgttttttgacatttttagtaccaaatattttatatccaatcatcatgatggtaaattcaatcatcatggcatagtaattagcattgaagaaaacagaattaagacgattttcacgtctgctaaatacttttaaagtaaaatgatcataacctaaacgatcgagaatttgaatttgttcaaatagtccataaatggcccatagaatcgataatgcaattaacatatctaaaataaattcaaaagtatcttcattgatatattgtcgataatataacattagtgaaacaaagataaagataagtgcgacacatcctacaccaatccaattttgataaattaaagaaatagctaatgttaaaagcataaaaattattaaatatttagattttggggtacttttaaacgcatttataatttttttagtgtacaataggtataatgtttcaagtaataaaaaaggtacacaaatataaaatggggtagataaactaagggcggtagcaataatcattaattgttccttagtaaaacgttcttttaatgaattgataaatttcataatagacctccaagtactgttactatagcataaatataaaatagacacaaacaaaggagatataatgaaaaagtatttatatgtttttaactatcccccagaagataaagaattatgtgctttagaatttagaacattatttaaagatgaatttaagagtaaatattatttatcaaataaagattatagtgttgataaaagtgtttttgtaaaagcaaagctcgatctttggggaatagatgctgattttaataaactaatcgaaaaagtgactgcgctgcataaagattaccagaattttaaagtaatatatttaaaaaatgaagttactcatgttgactatcaagaaagtttacttaggtgtaaagatatttcttggggtattgcaggaagtgttaatatgtctagaccgcaacatactatcgcgattacaaaattagaaggtcaatggctttgcggttattatcatcatggtgttccgtcttggcaaaaacacgatgataaacctaatactttttctaattctttagatatccggttagctcgaactttagttaatttagcagctggagataatgatcaggtaacgatcgttgatccttgttgtggtatggggacagttgttctagaaggactcgctttagatttagatattgaaggattcgatatttccagggaaatatcttggcaagcacgtaaaaatttaaagtattatggttatgatgagtatttgattaataaggtgagtattcatgacttacaaaaacattacgatgttgcaatcatggatatcccatataatttatatactccaataacttacgaagaacagtgtagaatgattcagtcctcgcgaagaatttgtgacaaaatgattatggtaacttttgaggaaatgagtaaagaaataaatcaagctggctttttgatcattgacagctgcttacgtaaaaagacagaatatgttaaatttggacgctatatttatatttgtatttaataaaagcaacatttagttgcttttatttatgttttatgattttttgaagataaggtatttgtgataattcttcaacattatctttatatagaaaaagcaatgttccaaaatatataatgactccaataacgattgcaataaatagagtgataatcaaacgatcaataactttaattaaaccatagtaacatagcgcgactgtaaatgccataattgctgaactaatcaatgggtagatgaaggtgtgtaatttctcttgataataagtagtaatatgttttaaagctctttgatttgcgaaacaaagctgtaaaccataaagacagttaccgatcaatagagaataaatatttaaattcgttgcaagtaaaagaaatagagtaataaaacaatggataattaacgcatatatagcattttttaaaggaatagatgaatatcctaaagcttgcaataatccattggtataggtagaaagaccatagaaaacaattgctggactcccaaatgttaaaagggtgctggctagaacaaccgtttctttttgcggaaaaattgcttgaataatcggaactgcaagaatactcattccaacggcactgggaataaggatcaacatgatgacttttgttccttgagcaatttgttttttaacttcagcagtatctttaaatagccatgctgatgaaatattgggaattgaagctgttgacattgctgaggcaagagctacaggaacgttttgtaaaataatatactcacccccataagccccaaaggcactgatggatttggcaccatcaccacaaactagataaaacatatacatatcaatagttgagataaggttgtaaacgcaagtagccaaaattattggagtaacaatatttgaaatcattttaaagatatctttaaacgaatctgtatggggatcggctgcttcgatatttggaggatttaaataactttgtttagttcttttgaacatgaacaacatataacataagctgattagaactccggcgccagtgcctaaggcactaccagttgccccgtgactagcaactagactttgattattaaggtatggttgaataaatagataagcagctccaattgaaacaccggcattaaatacttgttcgattatttgtgaaattccagtaaaggcagtagttttaaaggcttgaaaataacccctaaaaatccccaatagtccagaaagaaagatcgttggacaaagaattcgcaaagctgaaacagctttatcaggaacaatatagggtgcaattacaaatgcgataattgctgctcctccaccaactgcaacaatataaataaatgagcaaagaagaatctttttaacattattatattgattaacggccagtttttcagataacaacttagaaatagcagttggaatactgtaagaagaaactaaaagaattagtgcatatacattataagcagtagaatagtaacccattccttgtgaaccaatcagtttagttaatggacttcgatataacagaccaataattcttactaatattccagcagcagctaaaaaagcagcctgtttaaaaattgaattctttttcataaaataaactccttatggataataatgtcatattatattaaccataccatttattgaaggataaatgtatgaaaattttaattattaataagattcttgttttaattattttattttatcataaaaagataattagttctttattgtcggtagtttaaataaaaaagataaaatatgttagaatagggtgattagaaaattaattttatatttgcttgactctccggtaaggggagcttatacgatgtttatggaaggtgataagatgttttcgattggtgagttttcaaaaatggctaaaacgactgtaaagactttgcgacattatgatgagattggattgctggcgccggcatatgtagatacttatagtaaatatcgtttttatacgagtaatcaattagtaataattcatcaaattcagtcattaagacaaataggtttatcattagatgaaatacagatgattattaatggtgttgatggtgttgcaattctagaaagtcggaaaaaagcaataaaagaaagcattagtgaagcagaagatcaactttcacgcattgagtttattttatctggcaaagaggaggatacatttatgaattatcaagcaagtattaaagaattaccagcatgtaccgtatattcgaaaagaatggtagtccctgggtatgacagttattttgaattgattcctgcaataggtcaaaaagtgatgaataagtacccggacttaaaatgtacagttccagaatattgttttattatttatcgagatggtgaatataaagaaaaagatattgatattgaattttgtgaggcggttgatcaagtgaaggtagattttgatgatatcaagtttaaaaagatgccggcggttaaagcagtatctataatgcataaaggtgattatgcgggattacctaaagcatatgcgtatgcttttaaatggattgaagaaaatggatatcaggtacttgataatccccgtgagagctatattgatggaatctggaataaagaaagtaaggatgaatggctaacagaattacaaataccggtgactaaatagcggattgggaattagattaaattctaattccttttatttttgtggaaagatagggtataataaatccagatttgggggttagacaatgaaattattaaaatatgttaaagagtatcgatttcccgcgataattggatttgttttcaaaattgctgaagcagccttagaattaatggttccattggtaatggctgatattattgatgtaggaattaaaaacaatgatcaaaattatattttagtaagggggttatttttggtaggattagcggtggctggttatttatttgcgttagtatgtcaatattatgcatcacttacatcacaaagtgttggaacaaaattgcgtgaagatatgtatcatcaaattaatcgttatgatcatcataatttggataaattaagtgcgcctaccttagtaactagattgattaatgatgttgtacaaattcaattggcagtagcaatgacgatccggttaacttcacgggcaccgtttattatgattggttccttgtttttagcgtttttgattagcgggccgctggcttctatttttgtagttggggctatcgttttagcaattgttatgttgatgattacaataatttcaatgccgtattttaataatgttcaaaaaaagcttgataaaattagtttgatcgttcgtgaaaacttaaatggaattagagtaattcgagcatttgcttcacaagataaagaaattaataagtttaaaacagaaactcggcaacaaaaagatatccaagtaaaagtagggagaattcaagcattattaaatccatttacatatctgattgttaatgtggctattgttttaatagtttattttggtggaactgaagtaaatgttgggggattatcgcaaggggaagttattgctctagttaattatatgaattctattttattagccttgattgtttttgctaatgtgttatcgatctacaataaagcaggtgctagttatacaaggatttttgaggttttggaaacagaaccggcagtagttaatgatggacaaatacaaatatatcgagaaagtgaagattgtattgaatttagacatgttagctttgcttatgaacaaaaaaatgttttaaatgatttaaattttacgataaaacgtggtcaaacaattggaattattggtggaacaggagctggaaaaacttctttagtaaatttaattgggcgtttttatgatgttagcagtggcgagattttaattaatggagaagcgattaaaaattatgatcttcatgctttacgttcttttattggatttgtaccacaatatgcagctcttatttcaggaacgattagagaaaatttacagttaggaaatcaaacagccaatgatcaacaattgctcaaggccttggaaattgctcagggaaaggaaatgctcgaagataaagcggctggattagatacagtaattgaacaaggcggaaagaatttatctgggggtcaaaaacaacgtttaacgattgccagagcattagttaaacagccggaaatcttaattcttgatgatagttcaagtgcacttgattatgcaactgattttaaattgagacaagcattgaaacaacttaatatgacaaaaattattatctcacaacgaacagcttcaattgaacaggcagataagataatggttttatatcatggtgacttggttggctttgatagtcatgaacagttaatgaaagattgtaagatctatcaagaaatctatgcttcacaacatagtaaggatggtgacgatcatgaatagtaagacgataaagcggttattgacatattgtcgaccatatcgtgtgattttaggtttaatatttatcttatcttttattagtgtctgtttgacattaattacgccaatcttatttggacaagcaatcgatctattaataggaataggactggttgattttagtcgtttgttttggcagcttctagtgattgtaggagttgtgcttgcgggtgcattagtccaatggatcttggggcaattaactaataagattacttataatataacgaacgatcttcgtgatcgcgtctttgaaaagattcatttattaccattaaaatatattgatagtacgccacatggtgatattattggtcgagtaattaatgatattgatttgattgcagcgggtttattgcaaagttttactagtttatttactggtgttgcaacgattgttggaacaattattataatgtgtttgattaatttatcaattgcaatcgtagtgattgttttaaccccgttatcattactagtcgcttcactaattgttaaaaggacccatatctattttaaagaacagcttgaacttcgaggtgaaatgaatggttatattgaagaaatgatagggaatcaacgaatcattaaagcctttaattatgaacaaatgaatgaagaacgttttaaagaagtaaaccaacgaatgcatgtaagtggtgtaaagtcacaattttatggagctttgatcaatccgacgacaaggattgttaatagtctggtgtatggtgcggttggagtatttggtgcaattagcgtgttaaatggtagctttacggttggtttattatctagctttttaacttatgcaaaccaatataccaaaccttttaatgaaatttcgtcagtaatgacagaaatgcaaacagctttagcagctagtcagagagtatttaatttattagacgaacctgttgaaaaaccagtcagtaatcctcaaaacgttgaaataatggaaggtaatgtttctttaaaaaatgtatactttagctatgaccctaaagtatcattaatagaaaatcttagtttagaggcattaccaggtcaaacaattgcaattgttggtaaaactggttgtggaaaaacaactctaattaatttattaatgcgcttttatgatcaaaatagtggaagtattatggttgataatgttaatacattagatatggagcgagattatttacgtcgtatgtacggaatggtattgcaagagtcatggatatttaaaggaactattaaagaaaatatagcttatggaaaaagcgatgctacagatgaacagattattgctgctgctaaaaaagcccgggttcataaatttattatgaaacaacctgaaggttatgatactatgattgatgaagatggaggaaatatttctcaagggcaaaagcaattgatttgtattgcccgaattatgttaacaaaacctccaatgctgattcttgatgaagcaacaagctcaattgatacacgtacagaattacaaatccaggaagctttcgaaacgatgatgaaaggtcgaacgacatttattgtggctcatcgtttatcgacgatcaaaaatgccgatatgatcttagtaatggataaaggacatattcttgaacagggaacgcatcaagaattgttagagaaacaaggttattattataatcttcataatagccaatttaatttagctaagtgatagatatttaataaaaaagatacaataagctaaaatgattataaactataaaggtaaagataactgctggaggtaaactttagcagtttttattattttaaaggaaattattcaaaaagtattttgtgtataaaagaagaaatagggacataaatattttatacactaaaataaaaatatatgattattatagtttagtgtataattgaacttgtaaaaattaaaagaaagcgtatacactacttataaaatatgctctagtgtattaaaaaatgatgatttatcaagtttgcgagaaataattgattattttatagttgtaattggctagagcaagtagtgtcaaaggagttagctatgaaatcaaacaaagtaaaagtatttgagttcattaaagaatattcaattactcaaagtacagatgaatatcctaaattgacaactcagtatctatccgaaaaattagacatgcaaagaactaatctaagcagtattttgaatcaattggttaaagaaggaaaaattactaaaacaactacacgtccagtactgtatcaattagcaaatttccaattgactaatcaaaaagactttgagaatttaattggttataaccaaagtttgaatgaagcagtgatgctagcaaaagctgccattctttatcctcaaggaagtcctcatattctcttaactgcagaaagtggaagtggggttaaatattttgctaaaaacgtttatgactttgcagttaaatctaaagtattaaaaaataatgcaccatttacagttttcgactgtaaaacattcattgaaaatccgacgattattaatgaaatgctttatggtgatgaagtgaatactggactagtacatcagactaatcaaggcatgctgttgattaaacatgttgaacttttatcagggtatcaaagaacaatgttattttcaatcattacaagtaataagatgccctctaatcaatatgtagaattaccgcgtaattataaatgtatcatgctttgtgcaatagccagtgatgccagtaaggatctttatgatctctatcgtaataaaatggattttgttattgaacttttgccattaagtcaaagacccttaaaagaacgatttgctcttttagaattgtttttaaaacaagaagccagaaaacttgatcgggttctagaagtaagcactaatatattacactccttattattatatgaagtgaaggacaatatccgtggtttaaaaaatgatattcatacaggagtagctaattgttatgtaagagaacatgatgttcatcatcaccatattgagttattgttatcagattttcctaattatgttcgcaaaggaatgatttactataaaacatttaaagaagaaattgatgagattattcctggagattgtaaatttgcatttactaaaaatgaggtattaaaaaatagagcaaaggaaaataatgctaatatttatcgaacgattgatgttcgtaaaaaagagttaaaaaaacaaagtgttagtgaggaacaaattaatacattagtttcattacagcttcatcaagattttcaagaatatttaaatgaattgagtaatcgtgtaagtgataaagagcaattaagtaaaattgtttcaatgaaattaattagtttagttgaacgtttcattactcgtgtaagcagtgaactagcaataaattatcaagaaaatattctttatgggttatgtctgcatattaatgcttcactaattaaagtaagcagtaaacagcgtcttgcaaatgaagaaattaagcggatgattgatctttatcctaaacattatcatcttgctaaagaattcgttcatgaaattgaagaagaatttagggtaaagatgaatattgatgaaataatctttacaatgctgtttattttaaatgagagtaagcctgtaactaataaacatgttgttactttgattgcgatgcatggtgacagttcggctagttcgattgttaacgttgttaacgctttagcaatgcataacaatacttatgcctatgatttgcctttagataaaagcatggatgatgcctatgaagatttgaaagagcaaattataaagattgatcaaggtaaagggattattcttatttatgacatgggttcaattcgaactatggctgaatcaattgcttttgaaacaaaaatagaaattaaatatttagaaatgccagttactttaattggtgtcactagcagtaataaagccagtaataatgattcagttgatgaaatttatgaatatcttcaaacaaagtttaaagatataaaatattttagaaaacaaagtgataagaagatcttagtaataatttcaaaagagcagtcagaagttacaaggttaaaaagttatttaaatgaacattttgatttaagtaatgttactgttcatgtaattgaaaatagtgaagctaatcatctatacaatgaaatcaatattattgctaatgaaggaaaaattatcggaattattggtaataatagaccaaatttagctcaatatccttttgctgaagtgagatggctagaacaaaagaatgctaaaactttagaagagatattcattgaggaagatgaagcacgtgatgatattaatgaaatatttgaatatttaaaggatcagttcaatgaggtagatgttgatggaataaaagattatctattggattttactaagagtttagaagttacactagatgcaactttagatgaggatcagcaaatcggtttaatagtacacttggtttgtttgattgatcgaatcagtagacatcaagcaccgattgttaattttattgcatcaaacataattttaaatcatggaatgttagttagtaaggtcaaggaacttttagttcctttagagatggctttaaatatatcaatcagtgacgctgaaattgcaacgattatttcaatcgttaaaaagagataaatagaaagaaggattaaatatgactaaagaagaagcaacaatggttgcctttgaaatcgtagcttactcaggggatgctcgttcaaaattattaatggctgtagagaaagctaaagccggtgatttagtgactgctgatagattagtagcagaagctaatgaatgtttagtagatgctcataaagctcaaacagatttattgcaacaagaagctcgaggggataatgttgaggttggttttatcatggttcatggtcaagatcatctgatgacaacattattattaaaggatattgttgggactttaatggatgtatataaaaaataaaaatttaacgggggatcgtatatgaataaattagtttcaaatatagagaaattaaaacctttctttgaaaaagtttcacgtaaccgctatttacgagcgattcgtgatggtttcatttcggccatgccgattgtattattttcaagtatttttatgttacttgcatatgtaccaaatatctttggtttttactggtctaaagaaatagaagcaatgatcttaaaaccatataattattcaatggggattttagctcttgttgttgcaggtactacggctaagaatttagcagataattttaatcgtgatatgccggttaatcgtcaaatcaataatatttctgcgttaatggcagcaattgttggtttcttgattgttggggtcgattcgatcgaaggcgggtttgcaaatggctatatggggtcaaaagggttattaacagcctttttagttgcctttgtcgtttgtaatgtttatcgtttttgtgtaaaacgaaatgtaactattaaaatgccagatgcagtaccaccaaatatttctcaaacctttgctgatgttataccgtttgcggtttcagcaatcatctttactatttttgatattatttttaggaatgtaactggaatatgttttgctcaaggtgtaattgaattttttcaaccactatttactgcagcagatgggtatatcgggttggctattatttatggggcaatgtcattattctggtttgtgggaattcaaggtccatcaatcgtggaaccggcagtttcggcaatctattatgtaaatatagcaaataatttagatttattccaagcgggacaacatgctaataatatattaacaccaggagttcaacaatttgttgcaacaattggtgggactggtgcaactcttgtaattacattgatgtttgcatttatgtcaaaatcaaaagaattaaaagcaattggccgtgctagttcgattccggtaatctttggggttaatgaaccaattttatttggggcaccgcttatcttaaatccaattttctttattccatttattttcgctccgattttaaatgtttggttatttaaagcttttgtagatttcttaggcatgaatagttttatgtatgtattaccttggacaacaccaggaccaattgggattgttttaggatgcggtttaggtttattaacaattctttttgctgcagttattctactagttgattttgctatttattatccattttttaaagtttatgataatgaaaagtgtgaagaagaaaagaataagaacttagatgcagttgaaaaagaagaagaaatgattgaagtagatggaaatactttaaaatcaaaacgaatcttggttttatgtgctggtggtggaacaagtggtttattagcaaatgctctagctaaaggcgctaaagaacaaaatattccattgattacagctgccggttcttatggagcacatatggatattatgaaagattatgatttagttgtattggcaccacaagtagctaattattatgaagatttgaaaaaagatacagatcgtttaggaattaaatgtgttgcttgtgaaggtaaacaatatatcaatctaacaagagatcctgatggggccttgaaatttgtgtttaaaattatggagggagaataaaaatgaaatttcctgataattttgtatttggtggtgctacagctgcttaccaatgtgaaggaagtactttgaaatatggaaaaggtaaagttgcctgggatgattatttaaaaaaagaaggacgtttttctggtgatccggcgagtgatttttatcatcaatatccgatagatttaaaattatgccgtgattatggaatcaaagggattagaatctcgattgcctggtcaagaatttttcctaatggtgttggtcaaattaatcaagaaggggtagatttttatcatcgtgtttttcaagaatgtaaaaagcagggtgttgaaccatatgttacattacatcattttgatactcctgatgctttgcataaaattggtgattttttaaatcatgaaatcatcgatcaatatactaattatgcaaaattttgttttcaagaatatcatgatgaagtaaaatattggttcacctttaatgaagtatggccaattgcagtaaatcaatacattgtaggaagttttccaccagcaattaaatatgatattcctaaagcagtttattcaatgcatcatatgatggttgcccatgcgaaagcagtattggcatttaaagagggaaaatatccaggccaaattggaattattcactctttagaaacaaaatatccttataatgataatgaagctgattatcaggcaacaaaaaatgaagatgtattagctaaccagtttgttttagatgcaactttcttaggtgaatacactgatgaaactcttacgataattaaacgattagtcgctttaaataatggaacttttagagttgatctagaagatttggaaatcatgaaaaaagctgctaagttaaatgattatctaggaattaattattatcaaagccactttattcaagcttacgatggtgagaatgatatcttccataatggaacgggggataaaggtacttcacgttttagactgaagggtgttggtgaacggatgtttaaggaaggaatcgaaagaactgactgggactggttgatttatcctcaaggactttatgatatgatcatgcgaattaaaaatcaatatcctaactataaagcaatttatatcacagaaaatggaatgggatataaggatgaatttgttggaggtaagatcgatgatactccaaggattgattatattagaaagcacttattatggattttaaaagcaattgatgatggtgcggatgttaaaggatattttgtttggtcgttaatggatgtattttcttggtctaatggttataataagcgttatggactattctatgttgattatgacagtcaaattagatacccaaaaaaatcagctagctggttcaagcaaattagtgaaacaaaggagttagataagattgaattataaagcaattatctttgattttaatggaacattattctttgacaatgataaacatgttttagcttggggaaaaatctccaagctgattcgtggtagggggatcagtgacgaggagttgcatgagcagtttaatggaacaccgaatgctaaaaatattcagtatatgatgaataatcaagcaacgagtgaagagcttaaaaaatattcattattaaaagaagaatattatcgtgaattttgtaagcaagataaagcatcttttcatttggtagatggagcagtagctttttttgataaattaaaagaactgggaattccttttacgattgctagtgcttcaattaaagaaaatattgatttttttgttgaatcatttaatctggataagtggattgaccctgaaatgattatctatgatgatggttcctattcaaataaagttaatatgtttaaagatgcagcacaaaaattaaaacataatgttaaagatattttagtgtttgaagattctttttcaggaattgcgaatgcatataaagcgggaattgaaaaaatcgtagtaatctgtcctcaggaaaaagaaagtgagtatcgggatttacctggcgttatcatgacgatacaagacttcagtgattttaataaattaatctaggattggctataaaagtcaatctttttgttttttaaacaattatatgtatatttattatctaaaatcctaaaaataattaaaataaaaaaattattatcttgacaaacaataatcataagagtattctatataaaacattgtataggtatatacattaaagggggaaataaaaaatgaatggattattattactggcgctttcgatggttgcattggcagcagcttatgtaatttatggtcgctatttggagaaaacttggggaatcgaccctaaggctaagacaccagcggttgctaatgaagatggggttgattttgttcctagtagcaaatgggaagtatttgcacatcagttttcatcaatcgctggagcaggacctgtaacgggaccggttatggcattgatgtttggttgggtacctacagttttatggattattgttggggggattttctttggtgctgtccaagattttggagcactttatgcatcagtaaaatcaaacggtaaatcaatgggtggtatcattgaagaatatattggtaaaactgggaagaaattatttttcttgttttgctggttatttacacttttggtaattgctgcttttgctgatatggtagcaggaacatttaatggtttttcagctgttgatggttctaaattacagccaaatgctgcagctgcatcaatttcaatgttgtatatcgttgtagcgattgcttttggtttctttttaaagaaacggcatgtaagtggcaaagtgcaagcaatgctaggaattggcttaattgttttgatgttaattggagggattgcttttccaatttatttcagtaaaacaacttggctatatgtcgtctttgtctatattttctttgcttctgttacaccaatgtggttattgaaacaacctcgtgattatttaactacgtttttatttgttggaatgatcgtggctgcagtagtcggcgtactattctataacccaactatttcactaccagcatttactggttttacaagtgagacaggcagctacatgttcccaactttgtttatcacgattgcttgtggagctgtttctggttttcattcactggtttcatcagaaacaagtagtaaacaaatcaaaaatgaaaaagatatgttacaagttggttatggttcaatgttattggaatcactattagcaatcttagttgttgtcgtagttggttctttaactcaattagttagtgacggtgttttaactgatcagctagcttcattagttactgctgaaggagctactccatttactaaattctcagtaggggtaacggcttttgtttctaaactaggattacctcaagaatggggaatttgcattatgacaatgttcgtttcagcattagctcttacatcattggatgctgttgcaagaattggacgtttatcattccaagaattatttgaagtagaaaattctcaagaagcttcagggttgaataaaattcttacaaataagtattttgcaacattaattaccttgttctttggttatttattatcattaggtggttacaataatatctggccgttattcggttcagcaaatcaattgttagcagctatggtattgatttcattatctgttttcctaaaggtgactggtcgaaaaggatttatgttatacattccaatgtgtacaatgctggtagtaactttaagttcacttggtctttctgtatataacatcgtaaatgcatggatgacaacaggaacttttgatttcttgacatcaggactacaattgatttttgcaattttattaattgctttgggagtattagttgctttctttgattttagaaaattatttaagacaaaaaaagtgtaaaaaacattgagtaatttaattactcaatgtttttattatgctattttctttttaaaatagataaaagtagttatcgtaataacagatagaatacctagatattcaaattcaacttcatctcctgtttttacagaggttgtcaaatcatcttttttatcaataactgttgtagtattgctaccattgttgacaaaaatcagttcaccagttagtagatcacgttggtagtttttaaagaaattccaaatatattgggcttctggtttatagttccagtgagcatgatctttaattgcagcaagttccattactacaccgttattgttagacaaagttcctgtatacatgtctttttcaccaagttttgtccattgctgattatccaatttaatgccataataagggtttaaatccatattcatatccgtcacggttaagtcattgattttttgatatgcttgtagggcactatatatatgtgtattactgtcttcagcccaaatactaaaaccatataattgtgaagtaccgtattgacttgaaccatcaacaggaatcatttgaaagaaatcatgatcaccacaaatatataataaaggtgtttcatgtcctttataatcattggttaattcagtgattgcttcactataaagattgacaccagaaacagccccaacccctgcaaaagtttcactattcttgacccctaataataatgactcggcaccgcctgcagataagccggtaacgtatactcgtgatctgtcgatttgtggatatttaattttcaaatcatcaattaagttaataattccttcatcccctaaaccatcgcattttgaaaaattgacactagcatcctgccattctggggatacaacgataaagttctcttttgcagctaattcaatccaaccagaagaatcggcttgaacccgaggatcattaccgtttccatgaagcgtaagaactaaaggaactgaatctttcttagtatcaattacttgattaggtaaatattcaaaccaagtgtattttccaggcatatttgagacagtttgattaatctcttgattatgaatgattccaaggcgatcaaaaattggcgtttcaattagtttatacggttgctcagcattagctaaatttgtatcagtaacaggcatattatagaactcggttgtttcattatgctgacgatagtttttagaaaaaactgtttcccaggcattatcgaatgcattttttaatgtttcatctgtttttgaatttaccacgatttgtaatggatttgtagaattttgatagatcgtgtagttgttaaatgattgagattggtcagtttgattagcttgtttgtaataactaacagctgatgttgctgttgaacttaaatatgctggtataggaacgttataagttaaatcgctattcattgtaccgccatataccatcattccagcaataaagtaacaattttgactaatataattattgacgaaagtggcaccctcatcaattccgatcactttaatgttgctgacaccagtgccggctaattttttgaaggctgtgacatcatcattgttatattgcgttgatataggattaataatatatactttccctgcccattcatgaacattatcgagaagaccaatttcttcaattaatttatcagcgctagtaagatcttgttttcccgcaaaaatgtaataaataggtgttaagatattactacgttctgaggtgtagccatctgcttcactatcatattcgtagtaagtataattattgattgtgtcactagttacttcagttaaaatgttttcatttgcatataattgattaactgaaattggagctgctaacattaatagtgacaatgttagtgctaataatgcttttgttatttttttcattgttccacccctgattttatatttataacttttaagttacattaaaattatacaagcgcttacaataataaaacataattatctttgaacgatcaattcaaaataaaactagtttattcaaaaactgaatgaactagtcgatgtagcgaatatacatatttctaaagattggaataaaataagtaagctggatataactactaatttcatcattacgctgattgccaaatttatagatataatcaaactttgcttcatcagtatgctgtgtaatgcaggtaagaagaattttagggttattaagactgaataagatatctctaatttccttagttgaaggagcattgtaccattgaccactggtactgatacaaataattagggtatcttctttcaaagacctaagattttctgccataataatgggatcgttataactataagcattgataccatattgaaccatttctaattgaactagataaatattagccaatgaaaattcagaaccaataaaaagaacctgtttataattattgattattttaactaatctttcaagtgctgtcatatcaagcttatcaatatcattaaaagcattttgtaatgattgttttacatcatttttaatttcttcgttatttttactaataatcacttttttattattaaaagcattaagtcgcagcatttgttgtccagcaatgaaatcccaacgatactcattgatatttttataaccctgattttttataaaccggctaaccgaagcttgagacaagtaattgtcaccggctagtttttcaagactgatttcattgattttatcacgattagtaaagattgctttagcaacctgagtattagttgcattattagtagttttattaagatattgaattaaaccatgaataccttctcttttcatttttatcaccaataaaagtatagcataaaaatgaaatatttaattgtttttgaataaacattattaactaggtaatattttgggtcaataattattttgaatcaacttgattattaccagttcacaagagatagtaatttcaaaagaagagtttttaatggtctgttaaaattatttcaattgttgatggaagcccatcatcacgttcgacgaggagcttatagttagattaatgtatttagagagcttttgatataattgtttgataagagcatcatttgagctatcataaatcatatagaacagatatttatagttcaattcatttttaaacaattcaaataaatgacgtttttaatcaatttcttttatccatgatttattatttatataaacgagaacttgtttggctaaaatagattgatttaacggattatctaaattagtatcaacaggtaattgaaatagcataggcaccatcttttatatatatgcatatacgcttagaggaaactgatgattaaagcaatgattacggcacttagaacatcactgatataatgaacaccacttaagattcgtgaacagctaacgacaaatgctagaattaacatgatcgtcccaagcagtgaatttacctgaagacaagctaatgcaattgcaaaagcactgaccgtatgtcgtgaagggaaagattcaccttgcttatgttctattaaaggatcaatagccatagcttcataagggcgtttacgattaattactttgcgcaaaagtgttacaattaaaaatgaagcaagtggcttataaagtgttttagctaataatgtattttgagtataaagtaaataaacgagcaaaattgaataaacaataaaagtaataatagggatatagcgggtaaagcccataatgattttttgcagcaagggatgtttacgaatattagataacattgtttgataaaatttttccataaaaactccttattttaattgaatgatcgtttcgcctgcattcattgttaagatgcgccgaccagcacgtttatgtttatattgcttccgaataaattgttgtagtattttacttgaatagccgtgaactacagtaatttctttcgtattgggggataatgaatttagatagttatccagccggattttagcttcaatcgtagtacagccgtgaatatcgatttgattaaacataatagtctccttaaattaaagtttagttaattatactagatactttaaaattaaacaaacttgcaatttacctggatattaagtagaatataagagcatatgaatggagtgatataaatggcactgacagccggaattgtaggattgccaaatgttgggaagtcaacattgtttaatgcaataacaaatgcccaagttgaggcagcaaactatccgtttgcaacaatcgaccctaatgttggggttgtagaagtacctgattatcgtttagataagttaacagaattagttgaacctaaaaaaactgttccaactactttcggttttactgatattgctggtcttgttaaaggggcgagtcgtggtgagggtttaggaaataaatttttagggaatattcgtgaaactgatgcaatttgtgaagttgttcgctgttttagagataaggatgtaactcatgttgatggcgatgtcgatcctattagagatattgaaacaattaatttagagttgatttttgctgatttagatactgtagaaaaaagaattggacgaattggtaaaaaagcacaatcaggagacaaagaagcgaagttagaagtcgctattttagaaaaattaaaaagtacgctagaagccaataaaccagctcgagtgatcgagtttagtaaagaagaaatggatgttgttaaacaatatactttattaacaatgaaaccaatcatttatgtggcaaatctaggtgaagaagacttagaagatccaactactaatccacattataataaagtcgttgaatttgcagctggtgaaggggctgatgttgtccctatttgtgcaaaaattgaaagtgaattagttggaatggataaagaagaaaaagatttatttttacaagatttaggaattgaagaaagcggtcttgataaattgatcaaagaagcctataaactattaggacttcgtacatactttactgccggagtacaagaagtacgagcttggacttttaaagaaggtatgacagccccagaaatggcgggaattattcatagtgatttccagagaggttttattaaagcagaaacatatagttttgatgatttagtcgaatatggcagtgaacatgctttaaaagaagctggtaagattcgtcaggaaggaaaacaatatgttggtcaagatggtgacatcatgttgtttaaatttaatgtctaatggcaaaaacaaaaaagagttttattgagagaataaaaccgactggagctaaagatttaattagaaaaattattttattagtttgtatttgtgtattttgttatagtgcgtataatctagcctcaatttttcttgaatataagagcatggatgatagtaataaagaagtagaagaaacatatgttactgaaaatacagaacaaaaaaattcatataagacaattgattttgaagccttattagcaagaaattcagatgttaagggatggatcgatattcctgatactaaagttagttatccaattgttcaaggagaaactaatgatacatatattcatagtgatattgacaaaaaggaatttagagccggttcaatttttattgcaagtgaaaataaaaacccttttactgatttaaatactgttatttatggtcataatatgaaaaatggttcaatgtttaataacattaaatcatatacagaacaagattttgcagataaacacccgtatgtttatatttatttaccagatgggacagtaagtcgttataaagtagtagcagcacatattattccagaagagagtttattatataatactggaattactgatattcaagctttttatcaagagatgttaaaaactagtgatattaaggttgattttgaacaagctgcaggtaatccggtaattactttatcaacatgtacttcagctggtagtgaaagcggaaaacgtaatgttgttcatgcagtcttggatagagcaggaattgatcctaaaacggaaacaatggattaatttagacttgtggaaaatcacaagtctttttatatataatttttgcaatataaacttttatagtaaattagttatgaatggcacttgataagaagtagataattaacatatttttcttttttattacatagatttatagattataatatctatatacgtccgaatcaaagaaaaaaagggattaatttgacgaataaagttattttatgtatgataggtaaaactgttatagttgggagcaagaatatgaaagaaaaaatactcaaatttattacatcgaagttttttgtcttaggaattcaattattagctacgattgcagtagtctactttacattcaaactggatttagtgccgactaagtatttaattgctggaattgtggtattagctttgttattagcaggattctttggaattatttatagtagtgaacaaaaaatcaaaaaaggattatcgagtaaacgaggaatagttactaaaattattagtttattgacaagtatcattttgattgctggctgtacttatatttcaagagggaataattttattgaaaatgtttctaatgccactggacaagaatatgttgtttcagtgatttcattaaagaatggtaaaattactaaattaaaagatcttgatagttccaaaaaaattggagtatcttatgaaaaggatactgttacgattgctgaagccttaaaagatcttgataccgagattggtgatcatgaatatactaagtatgataattatgcttcacttgcagatgctctttatgagggaaaagtagatgcaattgttgttggtgaacaatatcgaacgatgctgcagacaaatcatgaagaatttaatgatgttactaaggttttaaaatcatatgcttatgatgcgaaaatggaagtaacgactaaacaaacagatgttactgaaaatgctttttcaatttatgttacaggaattgatgtttatggaagtttaaaaacagtatcacgtagtgatgtaaatttaattgttacggtaaatcccaaaacaaaacaaattttgatgacaagtatacctcgtgattgtcaaattaacttgcataaaaatggaaaaatggataaattaacacatactggtatatatggaacaagtgaaacaattaatacaattcaagatttattggaaatgaaaattaattattttgcacgtactaattttagtggtatgactaatattgttgatgctttaggcggaattacagttaattcaagtgaggcttttgaaactttgcatggtaattatcaaatcagtgaaggtttgaatgagatggatggtgataaagcattgtgtttcgttcgagaaagaaaaagattaaaacgtggtgattttgctcgtggtgaaaatcagcaaaaggttttaaaggcaatgcttgataaagctatgtcacctaagattattactaattttaataatattttaagtgcagttgaaggctgctttgaaacagatatgtcagataaagagattaagtcattgataaatatgcaattaaatgatatggcggattggaagatcatcaatgttcaaattgaaggtgagtatcaattaatggatgatactttttcaatgaaagggactaatagtgatgttatgattccttttgaatcacatattgaaagagtacgagaattgatcaataaagtcgaagaaggtaaagaaattaaagatagtgaattaaaaggattaactcattaaataagaggagctctttcgagctcctttgttgttttatttttttataataatggtataataagagtattaaattggagatagaagaaaatggtttttaatcgaaagtattataaattatgttttattatatatatgtttatcaatactttagcattgggctatttaggtattgagacgaactacctgtttgtgccattattgatttgggcattagtaataattgtgcatgatatttataaaaaaaagtttaaattaaaaaagaattacagtctgctaatgatcgttcaaggactgattttattgcttgctacagcgaggaatgactatagtgatttaaattcctatgttattgcagtaatgcaattagttatttatttattgatttttaataatcctgtttcaatgagcaaagatgatattgaagatgaagtacgaatgattattccactagtaaatgtattagttggtggagcttcacttatctctattggaatgtatttagtgcatttttctagtttagctaacggctggactttaggaatggtcgggaatcgtttgtttggaatttattttaatagtaatccagctgcttttttagcgtgtattacgattgttttagcgttagtcgcagtaaggcagaagtttaagggaaaatactggtatcttgcgaatattgggattcagctggtatatattcttttaacaagatgtcgtgcggcattaattattttagcaatcattatcgtcatggttggatattattttttaatacgtcgtaagccgtatagtaattttaagagattagggctggtaattagtctaattgtagttattgctggtgcaagtctagtaggtcagcgggtagttgagattgttccacagatgcagggaattgcttctaaggagacaagtcgttttcaaatggataaagttgttaaggcgggacatttattaattgctgggaattggcaagattttaatcaaggattgacaattatcgatgaggtttctaatggacgggtatcattaactaaagctgctttagaaatttggcatacggaaccagttattggaattggagcaaataattttaaaaaaataggcagtcaggaaacagatgcattggagtattgggcagttcaagttgttcatagtcataatgtttttttagaggcgttagtaactactggggtaattgggtttatattatttgttgtatttttctttaagacacttttaatgatttttaatgttttgaaaaaaagtcacggcaaagaaatatactttattgttcaaatgttcgctatgatcgttttaagtgaatttattggtagtttatctgattatggggtattctatatttattctttatcagctacattagcatggtgctttttagggtatttatacacatatcaaaatattacagaaataagtaatattgataagatttaaaggctattttggtagccttttttaattgcgcaagaatggtgcaagatgaaattaactaatgtgctatgcttagagcaggggaagtaaataagaatgaacaatgaagagcaaattaataaagtaatagattatattgaagaacatctacaggatgaaaatttaacacttactacgattgcacaggaaattggctacttaaaatatcatttgtatcgaatgtttactatgattgcaggaattacaatttatcaatagcttcaacgacgtcgttttaatgaggcagcgcggatgcttgtttatgaggatattgcattgattagtggttatgatactcaacgttcattttctaaaagttttaaagcattgtttaaaatgagtcctagcagttatcgaaagcaacaaaagttattgctggtgcaactaaaattagaacttaggtcagttgggttccaattatttaactgatgaacattgtactggcgggccgatgttctttttcttttgaattatttagttgataatattgtagattataaggggtaaaaataaaaattgtttaaaaataaaagcataaacgttgacatctttcgacattggtatataatgttagcaacctaacaataggaggggaaatagtgaaagaaaagcggatcggaatagaaattaggattcttgcgaacttgatttgccggtgtttaaatgaattgggttttaatgaagagcacaatggtttaactggacctcaagggttagttttagggtatttgtatgatcatcaagataaagatatttttcaaaaagatatcgaagcaactttcaatattcgccgttcaacagcaacggggttattacaatgcttagaaggtaatggttttgtaaaacgggtaagtgttgattatgacgcacgattaaaaaagatcgttctcacgaccaaagcacatgagttcaaagagttattagaatcacatattcaaaaaatggaagaaattttggttaaagatttagaaccgcaagaggtcgatgacttaatcagaataattggtaagattaagaaaaatttagagtaggagaacaaaatggaaaagaagtattacatgggaattgacgttgggtcaactacgataaaaatttatattacggatcaggatgataattgtatctattcaaaatatgagcgacattattctgatatccaagcaacaattaaaacattaatcaatgatgttaaagaacaatttggtaatttagaagtaacggctgtgatgacaggttcaggggggttatcactttcttcatgtctagatgttaaatttgttcaagaagtaattgcctgcacaaaaacaattgaaacttatattcctgaatgtgatgttgcaattgaacttggtggagaggatgctaaaataacttattttcaaggttcactggaacaaagaatgaatggaacttgtgcagggggaactggagcttttattgaccagatggcatcattacttcaaactgatgctggaggattgaatgaattagcgaaaaattatcaaatgatttatccaattgcttcacgttgtggagtatttgcgaaaactgatgtacagcctctaattaacgaaggggcaaacaaagaggatattgcgatttcaatttttcaagcagtagtcaatcagacgatcagtggtcttgcctgtggtaaaccaatccgtggtaaagtagcttttttagggggaccgttatattttttagatcaattaagacaacgttttattgaaaccttaaatttacaagatgacgaaattatttttcctgataattctcaactgtttgttgccatgggagctactctattagcgaaagaagaagaaaagtcaacaacgattgaagcgttgattgagaaattagataatattgatgaaacaatgcttgctagcgaagatacactagacccactatttgctgatgaaaatgatcgaaatgagtttagacatcgtcattatattaataaagttcgaaaaaatgatattaaggggtatgtcgggaatgtgtatttaggtttagatgttggttctacaacaactaaagcggtattgatcgatgataatgattctttattatactctttctatgattcaaatgaaggtaatccgctagatgtggtagtaaaaatagtcaaagatatttatgattttattcctcctaatgttaaattagttcgtagtggagtcactggttatggtgaagcattaatcaaggcggctcttaaagttgatatgagtgaagtggaaacgatggctcattataaggctgctacttattttaaagaagatgtaagtttcattttagatattggtggtcaagatatgaaagcaatcaagatcaaggatggaattattcaagatattttattaaatgaggcttgttcaagtggatgtggttcatttattgagacttttgctaaatccttaggatacgaggtgagtgattttgcaaagctggcattagagtcaaaagcgccaatcgacttaggaagtcgttgtactgtatttatgaactcaaaagtaaaacaagcccaaaaagaaggggcaaaagttgaagatattagtgctggtttatcatattcagtaatcaaaaatgctctatataaagtaattaaattaagaagtaaagaagaactaggggacagtattttagtccaggggggaactttttataatgaggcagtattaagagcgttcgaaaaagaagctggtgttaatgccattcgtccagatattgctggattgatgggagcttttgggattgcccgtttagcccgagaaagttaccaaggagaaccgacaaccttattaactaaggatgaattagaaaatttcacttgtcaaagtgaaattagatattgtgaaaaatgtactaaccactgtatgttgaccgtatctacatttaatgataatagtgagtatattagtggtaaccgttgtgaacgtggagccaatataccagtttcatcaaagaaattaccaaatttatttgattacaaatatcgtcgagtctttaactatcgttcactaactgaagatcaggctgtgcgtgggactgtgggaattcctcgagtattgaatatgtatgaaaattatccgttttggcatactttctttactaaattaggatttagagtaattctttctcctcgctcatctaaagcaatttatgaaaagggcattgaatcaattccatcagaaagtgtttgttacccagctaaattagcacatgggcatattgaagctttgattgagaaaggtataaaatatattttctatccaagtctagcttatgaacgtaaagaatttgataatgctaataatcattataattgtccggtcgttacttcatatccagaagtaattcgtaataatgttgataatctggagaatcgcagtattatctatcgaaatccatttatggacctaagcaatcgaaaaactttattcaataacttaaaggatgaattgcgggcatttaatgttaacgacaaagaattattgagtgcaattaatgatgcttatgatgaattagctaaatgtcggcaagatattcaagatcaaggagaaatggttttacaatatcttaaagataataagatgacaggaattgttttatctggacgtccatatcatgttgatccggaaatcaaccatggattagctgatttgattacagctgagggcatggcagttcttagtgaagatagtgtttgccacttagataaggatttagatcaattgcgagtagtcgatcaatggacatatcactcaagattgtatcgggctgcttcatttgtagcaactcagcctaatttagagttgattcaattgacttcatttggttgtgggctagatgctgtgactagtgatcaagttgctgatattttaaaagctcgtcataaaatctatactttgattaaaattgatgaggggagcaatcttggggcaattagaatccgaattcgttcattaaaagcaacgattgaaaaacaagctaaaaacaaaaaacagctctatccaaaatatcagcccttaaaagtaccttttactaaagagatgcgtgatcaaggttatactattttatgcccgcagatgtcacctttacatttccaatttgtagagacagcaatgcaggagtctggttataatttagtggttttaccatcagttgataaaggggcagttgatgctggtttaaaatatgttaataatgatgcttgttatccaagtattttagttacgggtcaaattatggaagctttattgagtggtaagtatgatttagaaaagactgctgtaattatatcgcaaactggcggaggatgccgtgctactaattatatcgcctttatccgtaaagcattgcaagatgcaggaatgcctcaagtacctgttatttctgccaatcttcaaggtttggaaaataatcctggatttaaattaactttgccactaattaaaaaggtagtaattggggcaatgtacggtgatattttcatgcgagtattatatcgagttcgaccttatgaagtaattccaggaagtgcaaatgatttatatcaatcatgggttgaacgatgtcaagaaaatgtaaaaaatggaagtattaaacaatttagaaaaaatgtttatcaaattgttaaagaatttgatgaattaccactattagatataaaaaaaccacgggttggtttagttggtgaaatcttagtaaaatttcatccaactgcaaataatgaaattgtagaaataattgaacgtgaaggtggcgaagcagtaatgcctgatttaatagatttcttccaatattgtttctataatactgattttgaaaatgaacattttcatgcttctaaaaattctgcacgaatttgtaatttagcaattaagtttgttgatttacttcgtcatgatatgatcaaagctttaaagaaatctaatcgttttgatcctcctgcatcaatccaacatttagctaaaaaagctagttcgattgtttcgattggaaatcagacgggagaaggatggttcttaacgggtgagatgattgaactaattgaatcaggagctcctaatattgtttgtatgcagccattcggatgtttgccaaaccatgttacgggtaaaggggcaattaaagctttacgcaaagcttatcctgaaagtaatatcgtggcaatagactatgatcctggtgcaagtgaggttaatcaattaaatcgtattaaattaatgctttcaactgcatttaagaacatgaataaaaaaccagagtaatctggttttttttgtactattttacgtatatacggatattgtacacaaatacacttgattcgttgacattaataactttattttctaaaatacatatataagaactaagttcgtatatatgaaaggagaaggaaaatgaaaatttcagattcgttaactgaaaaattattagttgtagcaagcaagattagtaatcaaaaacatatgtatgcaattaaaacagcttttacaacactgatgccggtaattattactggagctttttgtacgttgattgttaatgtagtttgttcgacggaaacaacagggattagtttagcaaaggtgcaagggttttcttggctggaaatgttcactgatctatttaatgcagcaaattatgctactttaaatttctttacaattgcagctgtcgttttaattggattagagctgggagttaaaaatggaataaaagggtttatgacgggaatagtagcggtttgtagttttgttgcatgcttaagtacaaatattgtagctacagtaggagaagagtcaattacggttgctggaattgccaaagattatacggcttctaaaggattgtttttgggaatgattattgcactgctttcggtagaactatttacaaaattatgtaaaagtaaatatttgaagattaatatgccagattcagtaccttcaaatgtaacaagcagttttaataacttatttccatttgcattgacaattattatttttgcagcgattaactatacagtggttcaattagcgggactaagtttatatgatatcatctatacttttattcaaaaaccattgcaggcagtagtacaagggttaccaggagtcttattgttaatgttagtagcacaaattttctggtgtgtaggtattcatggtaatcaaattattaaaccagtaagggacccgttattgaatgcagcaattttagctaatacggatattgttgcaaatccgaactataatccggctgatcttaatattatttctatgtcgttttgggatacttatggtaatattggtggttcaggttgtgttgttggtttgttgattgcatgtttagtcttctcaaaacgtgaagattataaacaagtagctaagttgtctattgctccaaatattttcaatatttctgaaactttgcattttggtttaccaattatgcttaatccattattgatgattccttttattattaccccattagcaacaatggcatttggatatttcatgacgattattggattctcagatatattagtatatgctttcccttggacaaccccgccatttattaatgcctggatagcttcaggtggcagtattggaacagtaattacccaagcactatgtattgttatttccattgctatttatactccatttgttattatcgctaataaacaaaaggatattgtttcacaatagaaggctgaagccgcattagcggcttttcgtacatacattagagaaggaaaattaaatgaaacttaatcgtacagccttaagaacaattaaaattcttgaatatatagctaatcaaaaagatggatgtactttgttagaaataacagaagctttagatatacctaaatcaagtgcttttgatattgttaagacattactgtataaaaaaatgattgtcgaggatcaaaatcatgggaaattaaaatataaaatgggaataaatgcttttattattggaagcgggaatattgagcgcttagatcttgtagaagcagccaaaaatcaattgatagaaactgctaatcattttaatgcaacggcatttcttgctatcttagataacaaaatggttacatatttatataagtatgaagcgccacatcgtatagtcactaatgctaatattggtacgagaaaaccaatctatagtacggcactaggaaaatgtttgttagcttttcaaagaaaaccagaagttattaaagatattttaaaagaaattgattttaaaccgttaacagaatatacgattactagccctcaaaagtatcttaaagaattaaaaagggttaaaaatatcggatatgcggttgattttcaggaagattctatttatcaaatttgtatagcagcacctatttttaatcacaataaaaatgtcgttgctgcaataagctgcacttttttatatgatactaatttaagaattaaagagattggtgaagaaatgaaaaggatagcactgactatttctaaaaagttaggttatatagatgatacaggcaggaggaatattcatggcaagtaaagtaaaaaagaaacaaaatttgcaaggtttaacagaacaacaaaaacatattataaaattgcggaatgaattaaacaaacctgatccccatcaagttaaggcttttacactatataaaattataacttatgtttttaatgttttatttccgccatatgcattatatagaatctggtgtaagaaatcggaattcacaaaaatagaacgctatgcccaatcagttgttgcagtgacaattttatgtatgtttgttttattgcagttagaaagatataaaattatttaatgggaaatcgttatcaatttataaaatcaagtaaagaatgttgacctccactacaaaagaaattatagtataaatagacgatattacgaattaaattcgtaattataaacttgctaaaaattaattggtatatactaaattgatggcaatggagatggaggaaaaaatgaagctaaatcgtacattattaagagcaatagaaatattagaattactttcaagaagtaaagaagggtatactttaacggagctatcattaatatttgattatccaaagtcaagtgtttttgatatcatcaaaacattagtatataaaaatatggttgttgaagataatcaaaccggtattacaaaatataagattgggttagcatcgtttcttattggaagtagttatttaaataatatagatattgtaaatatagctaaaagtaatttaattgatttcgcaaacaagatgaatgcaacaacttttatggctgttttagatgagaatatggtgacttatatttataaatatgagtcagaaaacagtattattacaacagctaatgttggtacaagaaaatcacttcattgtgcagcattaggaaaagctatgttagcttataaaagcgaagaggaaattaataaaatcattgataagattgattttatttcatatacgtattttacaatcaaaactaaagagaaacttattgaagaattagcagaggtaaggcaacggggctatgcaaaagatgatcgagaaaacactctgcaacaaatagctgtggctgcaccactttttgatcatgaaggacatgttgttgctgccatcagttgtgttggcttttatgaaagtagtatcgatttagatgatttaggattacttattaaagatgtgggtaaacagatttcctataaattaggctataatcctcagtaaggaaggagttggtaattatgaaaatgacatttcgctggtatggaacggatgatcctgtaagtttagaatatattaaacaaattccaaatatcacaggaattgtgagtgcagtatatgatataccggtcggagaagtatggccgattgaaaagattgaaaagctaaaagccgaagtaaatttagttggcttagagctggaagttattgaaagtgttccggtgcatgaggatattaaattaaagagaaatgattatcaaaggtatatagataattataaacaaacaattagaaatcttgctaaatgcggaattaaatgcatttgttataattttatgcctgtttttgattggactagatcttctgttgatcatcaattaaatgatggttcgaaagcattagtctattacaaaaatgaagttgctcaattagacccaacgaaactatctttaccgggttgggatacttcttattcagtaatggaagtgagtgaattaattacagcatacaaagagttgggtgaggaaggattatgggaaaatcttaaatattttataaaagagatcttaccagttgctgttgagtgtgatgttaacatggccattcatcccgatgatccgccttggtctatttttgagattccacgtattattacaaatgaaaaaaatttagatagatttttatcgttatatgatgatagccatcatggcttaacgttgtgcagtggatcattagggtgtgcttcttttaatgatattccgttgttaattagaaaatatggaaaaatgagaagaattcattttgcacatattagaaatgtaaaaatattagatgatggttcttttgaagaaagtgcccactattcaagatgtgggtctttagatatggtggaaattatgcgtgcatatattgaagtaggttttgaaggatatataagaccggatcatggtcgaatgatatggggagaaactggtaaaccgggatatggtttatacgatagaggtttgggggctatgtatcttggggggattattgatgctttgaaagatgacggcgacttataattacacaggatattctaacgagtagagttacctgctctccttatcgtgctctgtagtataccacctctctttcattatagcagggggataggaagagtagaaagaactagaatgttttcaagaaatatttgtgtccatgcgcgtagcgtggggaaatggagaaaaatatgaaaaaaacagtaaaattaccagagaattttttcttaggtgcagctgcaagtgcttggcagacagaaggctggagtgagaaaaaggagtctcaggattcttatatagatttatggtataaggaaaataaaaatgtttggcataatggttatggtcctgcggtagcgactgactattatcatcgctataaggaagatattgcttatatgaaagagattggcatgaattgttataggacatcgttaaactggtcacgatttttaacggattatgaaaatattgtagttgacgaagaatatgcgaattactatgataaaatgctggatgaattgattgctcaaggaattgaaccgatggtatgtttggaacattatgaaatacctgctgaattatttaaaaaatatgatggatttgcaagtaaacgtgtggtggaattatttgtgaaatatgctcaagaagcatttaagcgctatagtcataaagtaaaatattggtttgcttttaatgaaccggtcgtagttcaaactagaatccatcttgatgcactaagatatcctttttatcaagatagtaaagcttggatgcaatggaattataataaagctttagcgacaaatatgattatgaaagtttataaagagggtggatatcggattgccggtgggaagtttggtactattattaatgtggagacagcttatccaagagggaattctcctcgtgatttagaggcggctgataaatatgacttattttataatcgtatttttttagatccagcaatcttaggtcactatgaagagggtttctttgatttattgaagaagcatgatattttaatggaatatacccaagaagaacttgagattattcaaaataatactttggattgggtgggaattaatttatatcatccaaatcgagtaaaaggaagaacaacgatagttcatccagaagcaccatttcatccagatttttattatgaagaatttaatatgccaggaaagaaaatgaatcctcatcgaggctgggaaatctatccacaaatcatgtatgatatggccatgagaatgaagaatgattatcataatttcgaatggtttgttgccgaaagtggtatgggggtagagaatgaaaagcaatacaaaaatgaatctggtatgattcaagatgattatcgtattgaatttatctctatgcatttggattggctgcttagaggagttacagaaggctctaactgtaaaggatatatgctatgggcatttactgataatgtttcgccaatgaatgcttttaaaaatagatatggcttagttgaaattgatttagaagacaaccgaaataggcgtttaaagaaatcagcttatttctataaagaaattatagaaaaacgtagttttgaaatagaaacagatgaagaggtttataaatagttctgattttttctaagttatcagaattgaaaatacttgaagtgataaaggagaaggttatgggatttccaaagggttttttatggggtggagcaatcgctgctaatcaggctgaaggagcttatcttgaggatggcaaagggttaacgaccgttgatatgattccgcatggtgaaaagcgaatgtatgtaaaattaggtgacatgtatcctgttaagttaatagatggtgagaattatcctagccatgaggcaattgatttttatcatcgttatcaagaagatattaaactatttgcggaaatgggctttaaaacttttcgtacaagtattgcatgggctagaatttttcctcatggcgatgatgaacagcctaatgaagctggaatttcattctatcttgatttatttaaggaatgtcaaaaatacgggattgaaccattagttactttgtgccattttgatgtaccgatggggctagttgaaaaatacgggtcatggagaagtagagaaatgattgagtgctttataaggtatgcaagagtatgttttgaaagatttgatggtttagttaaatactggttaacatttaatgaaatcaatattttattacattcaccattttctggagctggaatagcatttaaaccagatgaaaatcatgaacaagtaaaatatcaagcagctcatcatgaactagttgcttcggcactggcaacaaaaatagctcatgaaataaaccctttaaatagagtaggctgtatgttagcaggaggacaattttatccatatagttgtgatcctaaagatgtttggctagcaatgaataaagatcgcgaaaatttaatgtttatcgatgttcaagccagaggatattatccaagttatgctaaaaaggtgtttaaagaaaaagatattaacatagaaatccaaactgatgacttggaaatattgaaaaaatatcctgtggattttatttcatttagttattatcagtcacgctgcgctagtgctgatcctagtcgtggtatgacggatggtaatgtagtaaagtctgttaaaaatccatatttagaaacttctgattggggctggcaaattgatcctttgggcttgagaattactttgaattatttgtatgatcgttatcaaaagccgttatttattgtagaaaatggattaggtgccaaagatactattgaagaagatggttctattctggatgattatcgaattgattatttgagaaaacatattaaggcaatgaaagatgcgattgatgacggtgttgatttaattggttatacgacttggggctgtatagatttagttgctgcttcaacgggagaaatgagtaaacgatacggttttatttatgttgataaagatgatcaaggtaatggaacgttagaaagaagaaagaaaaaatcttttaattggtataagcaggtaattgctagtaatggtgaaagattagattaaatatatttaaaagggtctgtgaagggctctttttaattacttgatttaaaagtattggcataatatgagacataattttaattcgcagataatgtatagtagtgagataatcttaaagagaagaatttaattagtttaatatactaaaatagaatgttatttgagaccaaaggggaatggattatgaatagtgcagattttttcagttagcgaaaagaaatatttttcattcatttatgcgatgtaatgagcaaagtgattttaagtatatctctaactatgcaccgtctgttattgcggaatttaatgataatcatttaataatcaaagactttaatactagaaaagatttctatgagttttgtcagtgtaaaatagatttatggaaagaaaattataatattttagatcctaaggttggtgatttaattgaaaattcgtttgtgtgatttaaataaaccattaaaaattagagaaatatctctagctttttaattaaataaaatgctctcttctaaacaacaagattatttgttctttaaaagggagcatatcacgtataagtttaaaagagtattataatcaactagttgaatctcgtcgaataacttcgactggcaaaataaattgctttttttcatcattgatagcaatatcattcattaaatctaaaagtaaactacaagctgttttagttaaagcgggaatgttctgcttgattgttgaaagtgatgggtggctggatgcagaaatgaaaatatcatcaaaaccaatgatcttaacttcatcagggactttaacattgttttctaaaagtcctacaagtaccccataagcacgccaatcattagttgcaaagacaccatcaaaaggaatattgtttttaattaattgattaattgcttctttagccccttcgtaattagcttgttcaatatccaataataattctagctgtttgttttcttgtaattgataatcttttaaagcttgacgatagcccattaaacgctgcttgttgacagataatgacttatttcgtgatacgattgcaatatttttacacccttgttgaattagttcttcagttgctaaatatccccctaaatagtgattagattcaacatagtaggcattactatgatctttgggttttcgatcaatacaaacaattgggatgtcacgagttaatgaatctgatgggattgtttcaattcctgaaatgcagatgattccgtccactaatttagaatctagtgatttgaaataagcaacttctttttcttcattttgtgaggtattacaaataaatactgaataattgtgtttaaaaaaatagttttcgatatctaatgctaactgtgaaaaccattcattatcgatgtttggaacaattaatccgattgtttttgattttgatgtccgtaagcttttggcggcaatattagcagtataaccatattctttaataattgtttcgaccttctctttagttttatcagaaaagcgaccattattgttgataactctagaaacagtggcgacagagacatcagctaacttagctatttccttaattgaaatattttttttctttaccatttttgttcccctccattttcattatagattaaaaaatagatattttcaataaaatgtaatcgcttactcacaaagaaaaaggtgaataaatacaacggcacatattgtgccatggatatatgtggaaacgtttactcaagatatatataataggagtatgaacgaaaggtaaacgtttactcaaaatataggaggattgtatggagaaactattatgtccatcaatgatgtgtgctaattttggcaatcttgaaaaggaaataaaagagttagaagaaggtgggattgatttttttcatctagatgttatggatggtagctatgttccaaattttgggatgggtctgcaagatattgagtatatatgtaaacaagcaacgaaaccatgtgatgtgcatctaatggtcgtcaacccaagtgattatattgagaaattcgcagctttaggcgtaaagattatttatattcatccagagactgataagcatgcttgccgaacattacaaaagattaaagatgctggagcaaaagcaggaattgctttgaatccgggaacatcttttgaaacagttaaagaacttttgtatttatgtgattatgtcatgctaatgagtgttaacccaggttttgcaggacaaaaatatttagattttgtcactccaaaattccggcagtttgttgatgctgcctctaactatggcggctatcaggtaatgatcgatggtgcttgttcaccagaaaaaatcgcgatgttatcaaaggtaggcgttaaaggatttattttaggaactagtgcgttgtttggcaaagaaaaaagttataaagagattattacagaattaagaaagttataaaggaggaaggataaaatgaatattttgttagtatgtgcagctggaatgtcaacaagtctacttgtaaatcgaatgaacgaagcggctgcagcaaaaggaatcgggattaatattgaagcacatccagttgggagtatcgatcaatttggagatgctgcagatgtgattttattaggcccacaggtgcgttatgaattaaagaatgttaaggctaaatatccaaataagccggttgaagttattaatatgcaagattatggaatgatgaatggtaataaggttttggatactgctttaaaattgattgaagggtaataagattaaattaaaataaattttaggaggtttattatgagttttccaaaaggttttttatggggtggttcaattagtgctgctcaaattgaaggtggttggaatgaaggtggaaaatcaccagtattagtagattattgcacagctggttcagctaaagaacgtcgtcaaatttggtatttagaccaagagggtaaaaaagtacataaagactgggaagcagttgatgaattaccagaaggatgtaagtttcagttatttgatgatttacattatactaaccatgtggctagtgatttttatcatcgttataaagaagatattgccttgttagcagaaatgggatatacaacatttaatacatctatatcatgggctcgtatttatcctcatggtattaaggggggtgttaatcaagaaggcgttgaattctatcgtagtgtttttgaagaatgtagaaagtatggtatggatccagttattacactgtataaatatgatgaaccggtttctcttcttgaacaacacggtggttggcgcaatcgggcaatgattgatgaatttgttgaatttgcacgagtttgttttactgaatataaagatttggtaaataaatggatgacatttaatgaaattaatatcattatgccattaaatgatactcctaaagataaagctaaaagagatctagcttatttgcacaatcaattggttgcggctgctagggcaactgttgttgctcatgaaattgataaagatcttaaagttggtgcaatgatttgtggaaatatgaattatccacttactcctgatccaaaagatgcatttgcacaatataaacgtttccaagatttctttggatatagtgcagatactcaaataaggggagaatatccaccttatgctaaaagaatttgggaagagtggaattttactccagaaattacagaacaagataaaaaggatttaaaagaaggaaaagcagactttttaggattttcttattatgcttcgggggtaattactactcataatgaagaacaattggatattactggaggaaacattttaggaagtgttaaaaatccgtatcttgaagcaaatgcttggggttggcaaattgatccgttaggatttaaacatttcttgcacattttaaatgatcgttatcaagtaccgttatttgatgttgaaaatggtattggactgattgaaactgagggtgaagatggtatttgtcatgattcggcaagaattgattatcatcgtcgacatattcaatgcatgaaagaagcagtcgaagaaggtgtaaacctatttggttatacaacttggggatgtatcgacttagtaagtgcgggtaccgggcaaatggataaaaaatatggatttatctatgttgatatggatgatcaaggaaatggtgatctacatcgctcaagaaaagattcattctattggtataagaaggtaattgccagcaatggtgaagatctagattagagtcaggagaaagttatgaaaattggaattggaaatgatcatgttgcg

SEQ ID NO: 226 - DNA, 35275 bp, Thomasclavelia ramosa
  source 1..35275: mol_type = genomic DNA
tccccttttataatgtttgttctgttctttcaattatatcatcttgagttgcttttgataagacattaaagaatgccgaataccctgcaaccctaacaatcaaatcacgatgcttttctggattcttttgagcatcaatcaatgtttctctagaaactacgttatattgcacatgatagccatgtaatcgattaaagaaagttttaattatcatttctaatttctctttattttcttctgtcgctaacatttgtggtgttactttttgatttaataaaacaccaccggtaatttcatgtgttggtaattttgaaactgttttgaataccgctgtaggtccatttttatccattgcatgagctggagaacaaccttcagcaagtggagtatgggctttacgaccatctggggttgccattgtcccatatccttgtccaacattagcagaaattgaggaagtacctgcgtagcgaatccctccaacaggtcctctttgatatcgagtacttggatattttttgatttcattaatatatgaatcatatgcctctacaaccaattgatcaacataatcatcatcattcccatatttaggagcttcattaattaacatactttgaattttttgattttcttcactcataaaatcatcttgtaaagcatcccataattgttgcggtgtaatctttttttcctcaaaaactagtttttttattgctgccaaactatctgccatattagcaattccaatttgtaatccagaaatgaaatcatagactgctccaccttctttaattgtcttccctctaccaatacaatcttgagtcaaggttgaacataaaatatctggaacatcacgctctgaggcaagatcgactgcattttctacaattacagataatcgggtaatttctctaattgacttatcccaggcatcttgcaactcttcaaaagacttcatatctctaaaatagccgtaaccctttacaaatcgtttaccagaagttacatctactccatcattcatcactgctaataaaattcttgggaaattttgatatgacattcctgtacaacgatatccccatttcccaggaacagctgtttcaacacaaccaattgctgaataattataagcatcttcctcttttactcccagatcaataaacgaaggaataataatttcatcattattaaatgccggcattcctgttcctaacttcataacttcgatacattcatctaaaaattctttatttaaaccattataatatctaacagtcaaattaggctgtggcaatcttgtttgagcaacagatttcaaaactaaaaacgaaagtttgttcactgcatcttttttatcaggagtttgtccaccaatagttacattttggtacattggactaccagcactgctaaatgtgtgagcctggcttctgaccttattaatagttaatgttttgatccataaatttgttagcaactcaacagcttcctcatccgtgattacgcctttttctagatccgctttcaaatatggatacatatattgatcgaaacgtccatatgataatgaatgtccattagattcaatttgcaaaatcaattgaataaaccaaactgattgaatcgcttctttaaaagatgaagctggttcataaggcactttagaacaaatattactaatttctaataactcatcctttctatgactttgagcattttcagccatttcttgagcaagaagactaaacctatcagcataagttttaactgcttcaattacaatcaatacagctttataaaaaacatatttatcaatattttccggaacacatagatccaactctgcttttaattgtcgcactcttttttcataaccgactaatcctatttttagtaactgttcataatcaaccgcaagatgagcatctccagaatttaattttccttccattccaaagaaaccagtttccataaaaacatttacttcttcaggtagtaaagcttcccccttagctcttaaattattattctcccaaaatggtgcaattgaacgtaaagctgcttttgtttcttcagtaatataaaaaacatcaccatctcttttttcaaatttgtccaattcatcaataacaaattctaacgtatattcgggaaaaattggagcatctttatttgaagcagcctgattcccaactattaaagtttcatcttcaatataaattgacattttctctaaaatattttttaacattagtgcccgtttcataaccggtggctgattttgatataatctataagattctgtagctaataatgctctctctgcacaaatatacggttttttatctaaaaccttttctctaaaatcattcattctaggtgttaaatcaccaaaatgttcaatgtttttcatatttttcctccaaagttactaaaataaattattaagtttcgttcataacataaattcacttcatttacacctatatattaacatatacgaacaataagtcaatatttttatttcaaaagcagtatatattggtttcaaatgaaatataaacatttacaatttgcaatcaacatgatattataaataatgaaaagataaggagatattcataatggaaaataaggggataatttttaatattcaaaaatttagtattcatgatggtccaggaattagaacaactatattttttaaaggctgtccattaagatgtaagtggtgttctaatcctgaatcacaactaaaagcagttcaaattttgtgggatcataacaaatgtacgcattgcatgacctgtatcaataattgtcctacaggtgcgattaaattaattgcagataaaattattattgatcaaaataaatgtaatggatgtttgagatgtgttaataaatgtcctcaaattgccctaaaaaatgaaggtgagtataaaacaattgatgaaattgtgacaacctgtcttcaagataaagatttttatgaagaatctaatggaggtattactatttccggtggagaaggaatgtcacaaccagcatttttatttcacttagttaatgaactaaaaaaacatcagcttcatttagcaattgaaacaaccggatatattgaacatgagctttttactaaacttgctccattatttgatctgttattatttgatgttaaacattatgatcgtgagcagcattttttaggtacaggtgtttataatgatttaataattaaaaatttaaagtgggcattacaaaacaaaatagaagtattaccaagaattcctgttattccagattttaatgattcattaaatgatgccaaaggactagcaagactcttaaaaaatatcggtgttttaaaagttcaattattaccatttcatcaatttggtgaaaaaaaatatgaaatgctcaatctagaatatagtttaaaaaataaaaaagccctccacaaagaagacttaaaagaatatcaaaatatttttatcaatgaagacatcaagtgttttttctaaaaagcttactataaaataagcttttttaattttctactttcttaacttcaattccatgatctaataaataattttcgcattctattggaatatgagtatcagttacaatacatgcgatttccgcagtaggaatcaaagttacaacccctttttgcaaaaacttaaatgaatctgtcacaattataactttatcagcttgttttgccatatctctaactgtttcgctacgcatataatcattcccagtaaagcctgaggtttcagtaaagccatcagttccaataaaaagtttatcaacaaaaaaagattcaacacatttttttgtgatcggtcctaccattacttgtgattcattttgatattcaccaccaagtaaaataattctaattttagcaactttacgaatataatcggcgataaaagcagaattagtaataatcgtaacatcttttttggtctgcgcaatttctaaagcaaccaatgcgcaacaagaacctgactcaatcattacggtttcaccatcttctattgattctaccgctaatttagcaattctttgcttaatatcataatgataagctaaacgattatttatatcatcactagaatttaaagttgcaaatccatgctcacgaacaatcaatccactattttccaattgaattaaatcttttctaattgttacttgtgaaacactgagtaactgagaaagtttagttacttccattttcttattctctgttattaattctagtatttttgtatgtcttgccaacatcttaaccatcctcatcaccgctcttttcttttattaccttatcatattaatatttcaaatacaataaaaacaactttcgtttcaatcatattattctcaaaacgaaagttattatttctaataatagaacgaaatttttttaccacgatattcccgacatggtaaaaattgatgtttaacacctaaaagtttatgtgcctttaacaatctagcatctgatagacaatgaccaatatactccttagttaatggataccgattatgactaggcaaaattgtttcaatttgattttgatatgtatttaatttttctaagctatgaatatacaaatctaaatttcgatgctcaccaaacatataaatcggtcctaattgtacagtatcaccaacaattaataatttcttctgaatatctaaaaatgcaatacttccataagtatgtccaggtatctcaattacctcaaaacagtaatcaccaatttcaatcaaatccttttcttttaaacaattaatttttattgttgttttaattaaacccttatctccctgatgtacataacattcttgaaaactatcaagtcccccacaatgatctccatcaccatgagttaacagtactttaagcggaaaactagtaagtttctgaacttcattaattatcttcgtctcaggaaaaccagtatcaatcaatatcgcttcatttctaccgataattagaaattctcgtacctgaccatcatctaaaatatataaatctttagcatattcagttacttccacaattaatcaccttcttttactcattataaaaggttattgacacaacaagcaataaccttttatattatttattaaatttgatcatctgccctctttttcaaaatttcaaaacgtcgatcaacttcatcttgagcagcctgaacaatttttgtatactttggatcacttaaatgtttagttcgctgcatcattgcaaaccaatcaattaatggaatctttttctttgctttctgtggatcatatgtaagattatacttaccctgctcaatttcaaacaaagggaaataacaactatttacccctgcttcaattacacttttttctaaatttggctgatcaccccaatttaacggacaagcagataaagttctcaaatatgctaacccaaactctttagcataagccttagctttaatcgcttttctaacaaaatctattggattagattcagctacagtagcaatatatggaatatttgttgcagccatgattgctggcatatctttattaaaaaatgattttccaaactgatcttgaccaagatgagaagtcgaacttttagcccctaatggtgttgaatatgataattgataacctgtattcatataaccaccattatcatattcaaaaataatcatgtgatggtttcttaaagctgcacctagtgcacttcccattccaatatccattcctccatcaccactaaccatgataaaagtaatttctccttcgggatattcatgtcgttttactttttggttaaacgcttctacgattcctgaaagtgtcgctgccccattttgaaataaattatgaacatacggtactttaaaagaagtttttggataggaagttgttacaaccattccgcagcctgtttgaaataataaaacaacatttccactgattgcacttaataataaattgacattgacgggaatcccacatcctggacaagcaccatgacccccagataaacgttggggcatctttgcaatttgattaagcgtaaacggcttaacttccattatttgtttttcttcattataaacgcacttgaagtcatcaggagtttctttgattggtttaaaaaattgagttattggttgttcaattttaccgggataaatatgtaaataatcaaataattttacatctttttgaaatcccattaataataatgcttttgcatcatctttataaaaatcacggccacctaagccataaattctcgtaattacacgggtagtgatccctgcctcctgcattgccgcctttatttctaaagacatatttccaccattggcaccataactatcctgacgatcacaaacaatcactgttttaggcactttaaaatgcttaattaattccttacttggaaatggacgcagtacattgattgtaactactccaacttttttatcatctttgcgtaattcatcaacagctcgttttgcactgctaaatccagaacctagaacaaacattaagacatcacaatcttcattttgataactttctacatactgataagcccgattagaaattgtttcatattccttaaaaatagccggaataacctctcgagcttcctccattgcaagatgaagctggtatttattattcattaaatccggttcattcatataagagccaactgtgactggatgttcaaaatcaagaatttgatattcaggcagatatttacctacaaaattttggacaacttgatcatcttcaaagacttgacatttatttttttgatggctagtaaaaaaaccgtcaaacgcaataactactggtaatttaactttttcagcaatttttagagcacaaatgttcatatcataaactgcctggggactatgagcaaataaaataatccatccagtatttaacatatacatgatatcgctgtgatcacccttgattgaaagtggaccagaaactgttcgacaagctacattcattaccatcggaaatcgtgttccagattgaactggaaactgttctaatgcatataacaaaccattggcactagtcgcattgaaaactcttgccccagcaacgcttgcaccataacaaattccagccgcactatgctcaccttcagcagcaattaaagcaatctcatgcttaccctcagctttcattaaatctaaattctcagcaatctgcgttgatggtgtaatgggatagtatcccattacatgataattaatctgtttagcggcataagctgccaattcattcccactttcaaataccatcttttgtttttccatcattttttacctccgttattttttctacctccaaaaacgaatcactcgttatccacgaatttgctcccacatcttcataatccatatgctcaacaattaaatctttgttacgaataaaccattttaaatttgaatgttcgcgttcgactccactaaccagtgcttgagttggacaaatttcaacacaccgtaaacatcctttacaatgatgataatccaaacctttatttaccatcatcttacgtcctttataaatacctggttcaaactgaaaaaccatatccggacaagtaatataacattgtgcacattgaatacatttttcttggagaaacaatggtatatagccttcccgtgatgcacttaaatcattcgaaatagtacttccaaaacaaggattcacaccaccaagtggtgcattttgataaccccagtcattttctatttcacgataaggaatgaacggatacttaccatcatcattaaacgttttactaacaacgccattataaccttcaattatcccttctttatttttttgtaatagctgaggatattttttacccaaagtagcttcaatcaattctaaaactgtctctaaaggaataaagccacttgctttagctagtgcccccagcatgatcatattgactttacattttattttcattgctaaataaattgcatcaatacaatatatcgttccagcacataattttaatttatctctaattacatctggttgctcaccgctgttgatgacaatacaactattttcatcgactcctgctgttacttgtaactttcctatcatcgcttcatgaaaaagcccaagcaaatggggtcgcgtaacgggagtattaacagtaatttctttatcttcatcacaataacgaataaacgccttgactggagaacctcgtttctctgaaccgtagctagaaaagcttgaagcattaaatcctagataagccgcacctaattcacctaataattttccacataaattagcccctaacccaccaacactttctaaacgaatttcataatacccttcttcatttactttacttaattctatcttgttcacttcttatacctcctaattgaataattcccgcttttatcgtcatcattccaaaaaaataaaaagtctattactagacttaatcttttgatttagctatttgaaacaaacacatgagcccccacgatgactcctaattcaaaaattaaaaatgaattaatcaatccatacatttatattatctccaatactatagtttatcgaaaaaataatatttttaaactaatttaattattatttctaaataaaaaaaaccaactctaaaatgcactatattggttatattaaaacaatatagtgcacttcaatcaccagactctataaaatatacttattaataaaatttgcaattccatcatgattattatcatcagttataaaatcagcaacactcttagttttttcacttccattagccatgactactccaactccagcatttaaagtcatatcataatcattatcagcatctccaaaagtacataaatctgtcatttcaattttatgcattgccataacttcttgtaatccatgcgttttagaaacccgaggatccatatattcatataaaatacttgctgtttttaaagaagctgatttatagtttggattagaaaaagttttacttttttcaataactttatccatataatcaggtgcacaaacaatgattaatttggcccgtggctcatttaaaaagacatcaaaatctacaactttatatggcacacgatcatcacgtgctaaatcacgaatataatcatcatctttaggtgcatataatgtcccttcatacggaatagcaaaattaagatccattccttcatgatgtttaataatatcttttattaattcaccatccagcggataacttgatttatcaatatttaattgataatcatatatttcagcacctccagtcccaacgattgcatcaaccaagccactaattccccatacagttaaaagtgttttaacgctatgaacatcacgccctgttgataaaccaaataaaattcctttttctctaattttcttaattgcttcaactgtcgcaggtgaaacaataccatcttgatttaacaatgttccatcaacatcacacattactgcttttatatttgttagtttattcatcacaatacctccacttagtaaaattatataacctttgatttttataacaatattcgtattttttttaacaaaaacttctcaaaaataaataagttcctatcaaatcaatgatagaaacttttcactattactttaaatattcaattacatcttttaatgatgagatgatcttagttgctttacttgcaaaatcagcttctggatacttcatatcaggaatacataagacatcgatcttaccatcataggctgctaagattcctgattcactatcttctaacactaatgcttcacttggtgctacattaagttttttacatgctgttaaaaaaatttcaggattaggttttccatgaatcacttcatcaccacagatcgtatcatcaaaatattgttcaatttgtgcattctttaaaataacatcgacacgtacccgtgcactgctagttgccacaattgttttataattatttgcctttaaatattttaataattctaataatcccgctttaagaggaacctcttttgctaaacgttcatcaagcctaatatgtacatcatcccatacttcagtcattggaaaggcagttccaaaatgatcataaaatacttgacatattccctgcttatttttccccaaacataagcgatatacagcttcatcaaaagaatatcctaattgttctaatttacgacaatactcttcataagtaactcgctcactatcgatcatcaaaccatccatatcaaatataactgcttttttcattatcttctccttatatttctgcaacaaactttttaatatctgtcaaagccgctccaattgctgctgtttcttttaaacattgacctattttaatatctggaacagtaaactttaatggatccaaatcactaactaattttgttaatagatcaagatcttcattttcaaacaatgaagctattttaccaccaataattactggtgcatctaaaaccatggttaaattatgaattgctaatgctagataatgaaaataatcattccatgattgcattgcagtttggtctttttgccgtaattgtttataaaattcttctaatgtcatatttgtatgattttttaataaagcatcttcattacaataagcttcaaaacacccttttttaccacaataacactgacgtccgttctctactaatgtcatatgctcaaatgtcgaactgtaattatttccctggaaaacctttccagccataaatacagcactacctagattatgatttaaagatagataaatagcatcgttattatcttcactgaaatttaattcagcaagtccagcagcatgagaatcatgaatcattttaactggtaaatcactagatttttcaaacttttctaacgttaatccctgattatttaaaattggaccataaataaccttttttccatcctgagatacgatcccctgaatagctatagtgatccctaaaaaattttcttttttaatttgtaaacaatcgataaattcatttaatgcctgtccatattgtttaaaataactttcactattatcataaactaaagcaactgtttgtttacgaatcagttgagcatacaaatctaaagcaacaaaagttattccttcttttaaaatactgacaccaattgcaattctagattgttccttaatagagattgctaacggcttacgtccccccgtagactcattaatatcttctttttttatcaagtcagcctgttctaattccaagagattactagaaacagtgggcaaagataattttaatctttccgcaatttcctgttttgtaatttgcttagcttgatatatcagctgatatacaatcttacgattatactttttaatactataatcaaccataaataccaccttatctaaaaaacctttataaaagtataacagttatctaaatatatcgcaatgaatatccaaatatccttattacttactttgaaaataaaataaaccatgctataatatgaataaagaagacagtataaaacccactaagtgataatcaatgaatgattatcactttttaaaaatcgaggtcaattaatgaaagagacatatagtaagaattattttgaaaaatatgctgcattaaccctaacaaaagtattagatgtatcagctgataatattattcaagctgatcgtcctgaccttcgcattccaaaacgtaattttggaattgaagtaactcaagcattaactccagctgaagcaattgctgacataaaaaaacctttatatagtactttaaaattaaatcctttcgaccatgatgaaaaaaatttagaattcgtaatcaataaaatagataatgctcttgagcgaaaagaacaaaagagcaaaaactatgagatttatttagataatggtttatatattttttcacactgtcacaatctccctgaacatatgctctatgactttcttaatcaattaaatctagctaacagtttttatcagcatatctttgttaattgtgtcgatcatctctattactatcgatgccaagaacaaataataattaaagttgattatagctttcaagaattatcagccatgaatcaacttgctattgattttgaaaagcattgtcataaagaacgcagaaaaattgaacttcctaaatcaaataatgatgcttaaaagaattgatccagataatcatatagatcaattcttttttatttaatgcatatgatttgataacttaataagctcgatctataatccagttgtagtaagaaaattaaaatattttgtagatttacaacaataaaattacatactaataatgaggtaaatcatttaaaacaaaatattaactatcatatatcaattttatagaaagaggtataaatatgttagaaaaaggaacagtagtatattttttgatgaatggctatgtgatgtctggaaaggtttttgatattagtggtaataatgataattatgaatttagtattgaaggttatgctggatgtgctgggcctcacataatttcttcaagtcaaatacatttgactgtttttctaagtcaagaagaagctgaaaaatacaaaaataatccccaaatgtatttaccagcatattgttaatccatacaaaattttataaaaaatcagcacacggtgaactgccaaaaaatcaaataattggaaaatcgttttttatggtaaagtatagttttaaatttaagaatatcgcttaaaaagtagttctaaattataattatcatattatttaatatctaaaatttttacttttttcaaattcatattttcttatattaaatatttactatgaaatctaaattcatgtatatttaaaagcaggtatatcgaataagatacacccgcttttaatcaactattaagacggtacttccagccattttttaaaaatcttcgcgataataagagacatctggctatattatcaaataccatcataatccaaactgcttcaatactttgatggaaaacattgatcattagccaagaaccggttaccctaattccccacatcgtaaataatgaaaaaacaaatggtgccttagtatcacccatcccattgaatgttccctcaagaattactaagatcccataaagcggttctgaaatagatactattctcaatactcgagcccccaaagtgataacctcatggtcaggagtaaaaatccccattaactgttcagcaaatataaataatgcaatcccacaaattatcattaaaaacattgtaataccactaatcaaataagttacctctttaactttatgctcatctttttgtccaactgcatttccaactaaagttgctgccgccgtttgaaaaccatacccgggaatataaaaagcttgttctgcttgaattgcaattgtatgagcagcaaatcgtactactcctaacttcgcaatcaaggaagcaaaagttacgtgccctaaacaaataacactacgttccaatactactggaatcccaatattcaaacattccttaaactcttttttataaaaatgaaaaccactgttttttaaatcaaatagtgtatttttatagtaacgtaagaacatcataattcctccagcaacaaatgatatagccgtcgcaatcgctgctccatttacccccagtccagcaccgggaattataattccaaataattctcgtgtcggataaattaacaagaaatttaaaattatattaataatattcatatataaatttattagcattggtgttttcatatcactgacaccacgtaaagccgatgccaaaatcaaagctgctgtcctaaataataatggaattgaaataatcataaagtatgatgccgcttcacctctaattgctttatcaccatttagccaagttggtaaatatggtgcaattaaaacacacattatagttaaagctatcccaacaattaatgtcaaaaatagagcttgctgccctacccgctttactttttcatcattatttgctcctactgcttgagcacaaactgataaaatcccaattccaaaagcaacagcaatactagacactaaccatccaaccgttgaggtcaatccaactgcagccgatgccccagctcctaatgcccctaccatcgctgtatcaacatatgtaacgacaacattcatggcctcttgaactaccgccggccaggctaaaaaacaaatcgatttaatttgttgacgatattttcccactatctcactcctacctaatctaataaaaaaagaccattaaatggctttaattgtatatactattatacacttttttaatatagatagatagccccaaacaaaagcttagtgctaaaattaaatttatttaataaatcctccaattcataattaaatcggaggatcaaaatctattattttattagtttatatatttctttgactgcaagatcatgctccttagctaatcgttttatactttcgtattccggatatacataagtctcatcattattagttacttctttagcagcaatttttccatatggtgtatccagctcaattgcttttcgagctaaaatttttctttcttcacgacgataacgaattccaattgttgttgtttctctaaatataatattctgtaataattctaatttatcttctttacatgctgtactcaatcgataggctgggcgattctttttcatataaatcggtgtaaagaagacatctaaagctccattttcaaaaagcttttcagcagtataagcaagtatttcactcgaacaatcatctatatttgtttccattacaataatttcatcgttagttttatcgattgttcctaaagatactttcaaaacattaggaatatttaattctttagttccacaaccccaaccaatcttttgaacattcataggaggcatcggttgaaacgatgaactcagctcagcaataatagccgcccctgtcggtgtcactaattctgtatcaatatcaatctgacgggctactacattactagcagcaaaaatttccgatgtcgctggtaccggaactgaaattgttccatgagcacattcaataaaaccatgcccatcattaacgatactgctatatattttatcaggtgcaatcttagtaattaagattgctgttccgatgatatcaacaatagaatcaattgcccctacttcatgaaaatgaacattagccaattcttcattatgaactttactctctgctaacgcaactcttaaaaagattctttttgctaatgctttagctctttcattaatcccactatcatcaataattttattaacatcgaataaattacgatgaacatggtgatgatgttcatggtggtgatgttcgtgatcatgatgatgtggatgttcctctaaatgaacatctacataagtaccagtaataccatttttctttgttttagtaacatgtaaatgatagccatctatattcaatttagctaattccttttgtaaataatcaggttcatcaataagttccattaatgcacctaaagtcatattaccacttattccgctactacaatcaaaatataatactttcatcgttttcctcctaaacaattaatcgtatgagccatatacccagctccaaaaccgttatcaatattaactacactaacaccactagcacaactgtttaacatcgataataatgccgaaagaccattaaaattagcaccataaccaattgatgttggcactgcaatgactggtttatcaactaaccctccaacaaccgatgctaaagccccttccataccagctacaactataataacatttgctcgtttgatcacatccatcttattaaatagtcgatgaatcccagcaacaccaacatcactaatcaaattaacttcatttcctaaaaactcagctgttaacacagcctctctagcaattggaatatctgatgttcctgcacaaacaacaacaatcattcctttattttgtatagtttccgattgttttaaaataaaagttttggcttctttatcataattaaaatttggatataatttctttaaataagccgcctttgttgcatcaactctagtcgctaaaatatcaatttgatcatgttctaacatattttttataataccagcaatctgttctttcgttttaccagatccataaatgatttccggtgttcccgtacgacgtttacgattataatcaatcgtcgcataatcaattggattatcaatcaaaatagctgcttcatcaacagaaatctcatggttctctaccatttctaatatttcttttactttcatcgtctacctctgatatcgttgtggcaactctaacccatttgcctccaataactcttgattagctaaaatttcacagggattaccactagatactatctttccattatttaataaaattatttcatcacacaaatccaataccatatctaaatcatgggttgcaaaaataatttgctggggcaattcttttaacatattaataacgatccttcgactcttcggatcaagaaatgctgatggttcatctaataataatatctctggtttcattaccaccacactagctaagcctaccattcgcttttgtcctccagaaagatgattagccattcgatccagcagatcttcaatcttaaataatttcgcaaattccgcaattcttttatcaatttcaattttatccagtttttgatttatcaacccaaaagctaaattatcacgaactgtaggtaaaaaaatcatatgatctggattttgaaaaacaagacctgctacctctcttatttgtatcaatgtttcttttgataacataactccattaattttaatctcaccttgcgtttccaccagccccaataagcttgataataaagttgatttccccgagccgttttctccaacaatagcaatacacttctgctgttcaatctttatcgacacattatcaagagctctaattgaattattataaagaacatttaaattatttatctcaatcactaaaataccacctttaccatcattaaaactcctactgccatcattaataaaaaataattttcaatctcaaaatcaacataatttaaatacgcttgtttaacatcaaagccacgacatttcattgcattgtaaacttcattacttcgttcaaaactccgaactaataaacttcccacaaaactacccatatctttaaaagctattcctttagactggggattttttaattgataagcttgaatcattgttagcgcttcttcaaccaaaacaaaaatataacgatagatcattactaattgtaaaacaaaaattgaaggtattttaagatgcactaattcacaagtaatactatcaaacttagttgttgccattagtaaaaaaactgccatcaaacataagatattttttataataatcgtaataaataaaagtacaccagttgatatgttaacaccataaaaattaattattgtggttgaaaatagtaaatttgaaaatccaatacacaaagaaataggtaatccaattaaacttcgtttaaataaatccataaatgatactttactaagtgaaatcattattccaattattattgaatataagggtaattcaaaaaaatctaagcagctggtcgaaataacaaaaattatatacattagtgctaaaataatctttaaaagtggatttaaacgatgaatcagtgaatcaccattagctaacttttcaatatagccaaattttaaaagtgagcctttaagtttattcatattttttcttttttactacgatatatccaattccaccaattaaaattaaagttgctgcaccaccaataatccctgatactgaaacacctaatttactgtcgctgccactaaaattataatctggtaaaaatgaagttgaactttgaacctttgctaaagtatcttttgtactgccgcttgcttcaatttcgtcggttcctgtgactccttcaatagaccactctaaaccatcaggattgcttgatgcatataatgaaagaactccaccaactaagattgttaaaacagcaaaaaccgcaacctgtcttcttatattcaatgttccaaaatgcttgtcattaagtgcatgatcaactatttcacgtttatcttttaatacatataagacaactgttgaagtgattaagccttcaactagaccaattgctaaatgaatcggcaacattaatacaacaaatgaagtaaatggtaattccgtaatattacttgcaagagtttgtaagaccactgcaaaagcacccatttctaatcccactactactcctaaaatacttgccagtaatactcttgaagaagttatatttttctttaatagtggcttaacaattaatggataagctacaaaacatggtaatatccccatgttaaaaatattacatcctaacgccaataaaccaccatcaccaaaaaataagcattgtataattaaaacagaacataatgataaaaaggcaggatattgtcctaaaataaggcacaataaaattcctccaccgatatgaccactacttcctgttcctggaatcgtaaaattgatcatttgagcagcgaaaataaatgctcccattactcccattaaaggaatctttcgatcatcatgttcttgattaatttttttaattgaaaaaccgatcatgataaaactaattatcatgaaaataaccccaatattaacagaaatcaaaccatctgccatatgcattaatactgaattcataatttccctttccacaaacactactgtgcttcttctagtacttcttgtacttgggatctattttaaaatattaactaaatctctaatatattcttgaattgattttggctcaacacctaagacatgtccagtgcatttactaactggaataaaatatttttgagcttcactacagctgattgctgccgccattgctggtgaaacttcaccatacatcgagttagcaaaaacaaaaccaattggtccaataattatctgagcgtttttagcattataaataattgcattttctcccgttgcgacagcatcagctccaccttttttcatattattggttgcagtactatttgttcctaccgcaataataaaagtaccactagcttctttttttaaggcctcaattacacttcggccaatgcctccaccttgaccatcaataactacaacttccatttcactacctatcataacttccactagttatgccttccaaatctaatgttacataatcaaatccaagttcttttattgctaagattaattcttcatcattaactagattaaaattgtttcgttcaacttcaatccgtgctaatttatcatgaactcgaacacgagcgtaataaatccccttttgatgaagtaaagcctcagcttgatcgaccacttctaatttttctttagtgagatgagtatcgtaaggaaaacgtgaagctaaacaagcatttgccggtttatcatatgtctcaatctgtaattcttttgaatactgtcttatttcagcttttgttaaaccaactagtgctaacggtgatacaattcccaattcttcgcaagctttcattccagggcgataaactttttcatcatcagcatttttaccatcaagggttatcttaaaatcatggctttgagctgcttcaattacttttgccattacttgttttttacagtgataacatcgatctttacgattatttgtaaattgctcgattgtaaatacatctaacggcacttctataaattgacctttaccagccatcattctagcactatcgatgtcctccttggacatcattttccctacacataatactgctagaacattttctttacttaaggtttgtaatgctacctgatataaaaaatttgaatcgcagccaccactataggcaattgcaactttttgataagattttaataattcttttaatttatctaacttactcatctcttcacctttatacataataatatcacaatccccatctatttactaattagaccatgctatgatcgcaactacactatacaccctaaagtacactttaagacaagtattttttatttagaaaataaaaaaagtgatttcaatatgaagcaaaccctcattgctaattcaacatagaaaattcacttcatcactatcactttaattttcagctaacttagaaggattataaacactaggggccttcaatgtctttaccaatacttttgcctgttcctcattaagttctataggctcaatattgtaataataattactagcttctttaattccataatttccttcacctaaatatgtaatattcaaatacatttcaagaatttcatcttttgtataatcatcttctaatttttgagcaataaaaacttcagctattttccggtctaagctcttttcaaaagataaacaaagatttttagctaactgctgagtaatcgtactaccgccttctttaaacgacatcgtcactacattcgttaccattgctcgagctaatccaatgtaatcaactgggccatgttgataaaaacgcttatcctcgctttctattactagttcttgatatatacttgatatttgctccaatttaacatagttatctttacttcttaattcttcaactcgcactgttaaactcttttcttccattgtatcttggtacatcacatagccacgatagccataatatcctaaaaaggttaaggcagctaagaaaagaataataattagacgtgatattacttttttcatatacatccctctattccttattttacacctctatcatagcctaagctggttggttattccattgatttacattacaaaatcttacattattgtaatatttatcattaattccttgaaatcattatcgatcagcatagtatttaaatttaaaattttcttattttgatgaccacgaggaattaaaacacaattgcatcctaatacttttgacatttcataatcatgaattgtatcaccgacaaataaaacatcttcttagtttaaatgattatttttataatcttgtttagctaaagctactttactacgaacaaaattatccacaattccaatcccaaattggatatttatatccctacttgatcactatcctttaaaacttttattaatttgtatgatgatttaataaaatcattcttttgataaaattgatgtgcttctatacgtttaaaattactagtaagttcaattacttcacattgatgctccaaagctaattttgtactaaaatcaactaataatctacctataccatttccacgataactgttatctataactaattcttcgattgttgcaactttattctcatgatgtaattgataatcgatattaacactgacaaatccaacaatcatatcatcagatacagctactaaatagtggctcttttcatcattaagtttattttcatatactagagcaaactgttcatgatttaaattacattcctctaattcacaaatcagtttataaatagcttccagatcctctttttgacaatatcttattttcatattttttgctctactttcatttaaaaatatttttattcactttatcttatcattttcaataaatttattagttaaagtaaaatcatctagtttttgacttctatattaaataaaatatctacttcatctatataaagattgggtatcaaaacaatattaagtactagaacatctatattagattcattttctagatatttaaactgttttattatcatcctattttagtgattattatatattaagtatatttaatgaaggcttctacaataaaagactattagcatatatcaattccaacggtcctttaaaattatttagtttttcattccaaatgaagtttcatgttttagaactgctatttcttccatcttaattgaatctattctaataaaacgatcatgctgtaattcattgatcaaataatcaatcaacttctcctcaccttgaatacaagcttctacagaaccatctgataaattacaaacccagccagttaatccaagattttttgctttttgataggtagtaaacctaaatcctacaccttggacacgaccataaaataaataatgccttcttatcattctaccttcacctctttaacaaaaacttctattataaatatcgtaccacaataacttcaacctgcaacttcaactttcttctttaatatatcaaaattatcgatttcaaacactatcccggctatcatatctaactgtttacttatcagctctgactctctctgtttcgctagttctcatatctcctcgcatttttaaattgatcctacatcgttatcatttatgttttttctcttcgtctctgattataccattataatcattttttataaacaaacagcatagtcgctccaattttttacgtcctttaaattcactaaaaacagtaataaaaaaaggaaatcagtttatttcctcaattatatataatttcaattcgattaaaagtaaactactttataccataactatatttatgtgtatcgtataaacatttacaattatgacttattatgttcatcgccttcttctaaaatcatattatttaaaaatgtatccatacattctttttgaaagaagaattcttgtaagctttgtaaaagctgttcactatcgattcctaatttcaatacaaaaataattttaactaatttatttttccatacaatcggtttcgataaaagataagcgtttattgaactcttttgattatagataggcatataatgaataacagtttgtaaacttgtttcaaaaccaattaatggatttgtatgataaaatgtttcaaatgagacactttcatgttcaaatatatatgaaataacatcatcttttgtttcacaatcaataaaataagtatcttctttttttaaaaaatcagataatttatactcattaatttgtcgaaaatacttatttaaaacttcaaaatcatgagtagttattataggatgaatacgtataacaggaatatcaaggctttcatcaagtggtacagttgtaataatataatcataactttctaaatgatatttactaagttccccagcagagattgttttttcaataaccaatgaatctttatatctttttaaaatagagaaacttaataattcactcattgccacattgtactcattaattaataaaacccgtttcttcgcaatatttcttttccttctctctaaagcatattgaaaatgaatagcgatatagcctatttcatcttcaacgtttatataatctgcattattataaatagcaagccatgcttccatactcaagatatatgctagagtataattttctttaataacataaatcagcggatttcgtgaataagtattaaatttcaaacgattttccattggattgatatgaatccccaatgcttttcttaagtacatatcattgtgaaaatcaatattaaagacttttttaacctgattgaacattttttctacaattatatcaatttcttcttttaattgatcattgatacagctttcgattgcactagttgaattgcttttttttcctaaaatatgaatagctaaatagcattgttcctctactgataattcaatatgaaaatatttattaataacttttgaaacatcctttgctactaaaaactcatattccattttcattttttcaatctcattatcatgaaataagatataacattttctttgaatacgattcaattgaacttgaatatgtataataaaattttgaaataccctttggggcatcgtaataccatcattaaaaataacttttcttaattcatctataaattcatgatcttcaccaattttcgttgataacatccctatcttatgataaatatattccgccatacataatcgataacgaaattcttcaccttctatttttaatcctttaccggttttttgcactatttttaagtcaaaatcatttagccgttctcttatgtattttaaacttcgactaacagaagttctatcaataaataaaatatcagatatatcatcgattttaataaactcttgactttcgagcattaaacctaaaatataataagccctttctaaaggatttgtaggaataaaataactccattgcttagatactttatcaatccaacaattaaacaaatcatcatcaaaaatactaatttgataaccatgagaaggaattgattgaataagtgcaaagttattcatcatttgattaagtattttaatttcatttctaatagttttagaactcacattcaataattgagatagtttttgtccagttaaatatctattagaatccataaatacttgcaaaagatttaattgtctcttagtaacaacactcatatttaattcctccttctattatttcaattatataataagttttatttatttgtaaaataacagatagacaaaataaatcagccttaatggctgatctatttttattcaatccgtgtccctactgtagtagcaaaatcactgtatacaggatcagatgaattaatcccattacattctggtaaataagtacacataatttgaaaaggtatcacagcatttaaccatgaagatgtatatgaatgctgattaatgtgaataatattttcattacttgtttttaaagttgaaataataagataattgcttgttttagtttttataaaatcaataaaattattcatcaaaatctttccacatccatcagtatcaataagaacaatataagaatctttaataatcgttctatgcggaccatgcataaactcttccatatcaaaattcatcacaggaatttgcattgtttctaaaatctttagagttccttctctagcagttggataattcactccaaaaccaacgatactcattgcttttgctaaagcccaatgcttatttttttggcaccagcaaagggaagcttttatattttgaggtaattcttggatactttgataatattcttgagtgatagattgataccggggattttgagttattttcaacaatagcaaatgcaaagttagtactgttgcactatatcctttaattttaggaccaacattttcttctccacacaacatatcaatatgaatattggctttttttgcgattgggctatcaccattagccgttattgaaacggttggtatatgatgctgtttagctatttgtagacattctaatgtacccgtacttttccctgtttgagatataactataagtatattttgggggttatataaatgttttgagtaatatcttaactgaaaaggattttccactataatcgagcaatccgcttctttttcaatcaaacatttcactaacattgcagcgtttaatgaggtacctgatgcagtaattataatttctttaggacttataaatgtcttagaaagagtagaaaatgtatctctttgtaaagaaagaatattttccaaaataactttttgctcatcaatatagccccacatcttattttccatgatgataaaattgtggaagatattccttatgggcttccagcatctcctctaaaagtggttttgctacatcataatctcttactaatggatgagcaacaagagcctctaatgctagttttttatttcccgtgatcgccgcttcaactgctaatgattcatatgtttttactgcactaataagtccgataacagctttaggatagtgagcaattgttaatggtttcatgccatttttacttacataacaagctgtttcaataacagcatcatcatctaagaaacgaactgttccattattagcaacattgataaccatccattttccactatcattataaatcgcatccataacaccaatcgcaactttggaatatccaccaccgccacgtttagctaaagtttttggtttttgattatttaattcgtctgcatactccctaaatatttgtttttctaattcaagaatagcttcacctctagtcttgtcttgttcttttaattgttgtactctttctttcgtatgaaaataatattgtgtatactgactcggaattaagtgtaatgtctccatccattcttgtgaaacagttgtacatttttttataactttactaaattcttcatcagtaatcggtcttccatcaatagtcatattataagaaaaattcatatgatttaatcctaaataatcataatagattttttcttctggaatatttaaagcttcagcagcccaccatcttggtcgcattcctccagcacataatcccgccactttaacattacaaactttatttagtgcttcagttactaatcctgttggatttgaataattgataatccaagcatctggacaatatttttcaacatctttagctatttcaatcataactggaattactctaaatgcattaaacattcctcctactccagttgtttcttgtccaatcaagccatattttaggggtattttttcatcctttattcgcgccttatttcccccaactctaatttgtgttgaaacaaaatcagcatcagtgaatgcttcttctcttgatgttgtactccatactttcacatcataattcaaataaccaacatatctttttacaaacccttccataattgaaagtctttcttcatttatatctaataaaacaatttcttttactggtaatgtttcacggtgttccgataatccttcaattaattcaggggtatacgaactccctgctccaacaattgcaatttttaactttttattcatactcatgctcctatccttttttctactgctaaacgttgtctttccattgctttaaagaatggataatatatacatcctgctattaacagtgaaatacctccccaaataacagcaggaatattcccaccagtaactaaataatgtgaaaataatggtggtattgtccatggaatattagctactggtcttcctataatattgaagagcattaatagatatgttcctgctgataaaattaatgttgacaaagtatagggtatcatcatgtatggattcataactaatggtaccccaaaaacaactggttcattaatttcaaatatacttgctggtaaacataattttcctaatgtactgaatcctttttcttttgaacggatcatcatcaagacaagcggtaaagtagcaccaccgccacctaagaaaacaaacatagtaaatccactggcagtaatataaggtggctgagttccagctgcaaaagcagcagcatttgctccaaacatagttagaaaaaatggatcagctacagccaaaacagctccaccgtgaataccaacactccataacattgagcgaataaacatgaaaaccaagaatcccggtagagtatttaatgcaaaaacaaatggtgagaaacaatccattaaaatttgattaacattaatacctaaaattacacgaattatccatataattgtcaaaatgacaaatgctggaaccaatgacataaatgattttgatactagaggtggtactgtatcaggaaaatgtatcacaagatctctcttttgaaaaaaatgcataatcattcctgacattaatgctactaaaatagctgtaaataatccttttgtcccaaataattcaagattaatcgcatactcatctgttagtgtcgccaataaaaacgcggcaacagaaacaaatgctgtaattaatggatcaattttaatatccgtatagcctaaagcaaaataataagctacactagcagctccaaccagcccaacaatcccaatcgttattgtattaactgttgtaatcatagcagcgtatggttcaaaaaatgattgaatcggatcaattggaatattgggaattagcaaaaagatacttccgataattgttaatggaactgtaaccatcataccgttcttgactgcattcaaatgatgctgattagccatcttatttaatggtggtactagtttatcctcaacaaacattaatattttattcattatttttctcctctcatttccacgagcgctcttctttgtacaatctaataataaagagaaagtatgtttatttgaatagttaaaatttcccttggctagtggaaataattgcataattaaaattattttatctttcttctatatatcttcttacttactaatttatttttcctcaattcatactaatatgaaaataaaaaagagtttcaattatatattgaaactcccatcttaaaaagtactaattaaataacctaaatctttttatcatttaccctattattaaagatttcgtgctacttcataagcgtcccaaatagcaccacgaatatttctcacttctttactatcacctaaattatatacatatgtgtatttattttttaatttatcaaataaatcatgtttagatttataaccgactgcaacgatagtttgttcagtagcaatagtttcttcattattatcttgaagaactttaatttcttgattacctattttactaacttttgcatttcccacaattcgaacattattaaatgctaatagatcacgaagcatccattcattcattggcggtaaagcaatacctgattttaaaatatctggtaaggcttcgataattgttaccttcttaccattttgtgccaaatgtaacgctaattcacatccaacaagaccaccaccaataactactacgttatcttttgcagctactttattagtcaatacttcattagctagtaccgcattttcaacaccatcaattggaggtatcactggaatagaaccttcacagataaataaactatctggttttaatgcatcaatcgccgcctcatcagctaaagtatttagtttaacatctacacctaatctttctaattcatttgtataataagaagctagcgctaaatcatcttctttaaacttaggcataccaccaactaataattcaccaccaaggcgatctgttgcttcaaataaagtaactttatgaccacgaagagcagatacacgagctgcttctaatcctgctggtccgccaccaacaataacaacatttttctttacaaatgctggtgcgacacccacagtatcttctcgtccacattcagggttaaccgcacaactacctaacccagattgtaataaacgcccaaagcagccgtcatgacatcctaaacatgggcgaattaatgcctctaatccatcttttaatttatttacataatcaggatcacttaataaaggacgtcccaatccaactccatcaatagttcctttgtttagagcatcaacagccatttttggatcatccatccttccggcaatcaataatggtacttttgcagcatcacgaattttttcaactaatggtaaatacatacctttttcaaaatacattggtggatgagcccaataccaagaatcataagtaccagcatctgcatcaaaagcatcataaccagcttcttgcaatatttttacagcttcaatagcctcatcaatatctcttcctaactctttaaaatcttcacctggtaagccaccttgccgtaattgtttaatatagctcttaattgaaaaacgcaaaataactggaaaatctttaccacatttatttttaattgtttcaacaatttctgtagcaaagcgtaagcgtccttttaaatctccaccgtatttatcggttctttggttaaacaaagtcattgtaaaacagtccaataagtatccttcatggacagcatggatttcgaccccatcaaaacctgaatttttagcaataactgctgcatcaccgaacttctcaataatatgttcaatttcttcggtcgttagttcacggcaaggtgcattaggaatccaacgatttgttgttggacttggagcaacaaaatctttcatatcaacgaaattaggcagcgccgatctacctaaaccagcagttaattgtaaaaatatctttgttccaaaagcatgagtacgatcagtcatttccttagccttatgttcgtattttaaaggtaacatatttgggcaaggaaaactgcagcgagcatgaggttccacgtcattttcaacccagttagctcctgttataatcaaacctacgccaccttttgctctttcaacataataatcaatactttgttgggtataacaataatcttcatcaacatctacgattgttgccatcggtgccataaaaaacttatttttcacctcaacattcccaatttttagcggttcaaataatggttcataaatacttttcatagtagtctcctttcaaaactgaacttgttcatatttatattttaacactcattgtttgcgcttacaatgtttttaagataaaatgtataatgaaaggattaattatgaataacattaaaacaagtaaggcagaaaacactaaaactaatattattaaggctttagaacagttatctaaggatcaaaatcttgacaatataaaaataagggatatatgtacattagcaaatatctcagtaggaaccttttatttatattttaaaagtaaagaggaagctattttatatatttatcaacaatgtgatgagcagtttagaaatttaaaactaactaatgatccacttgataatatctatcagatcttagatacctattatcatatggttgacattgataacataaattttgatcgtactatttataaatgccacctaaatcattatgatgagtactttttttcagaagaacggccaatctttattttactaaaccaacagattattgattatacaaaaaaagctgattgtaaagatataacttgggatattctagaattttctcgtgggcgtatttataatgcctgtatttcttttaaggagttagataatacctggtataaacaacaaataaataaaacaatctcttatttaaaatatctaacacttaaaacataaaggacagaatgatttaaatcattctgtcctttaccgtatttatctccatttatataatatggtttataaccctttgaagttaagtctaatattgatttctctactgtatctgcaatattatttttattacaaaatacataatgcgctttagttagattaactaaaaaactattaaatgtatcaattctatcccctctatcatcacttggtgaaacgatataacacggaattctttttttataagccagatatgaaattactctgcataaattggacctattattaccatacccttgctcagtccctcaaatacaagtaccaattcatattttttaaataaattctttcatatcaaaaagcctacgtaatttatcaaaggattgtctcatagactcagataccgcctgctgtgtaatccccaacaattcactggttttctgctgatttctatcttcaaaaaacttcttgtattaatctccctttgtttatcagtcaatgcagataacatcatttctatattttcacgcataataatttgttctaaacatccgtccacacagcgaagcacctcccaatcctctacataggcactatatgagattgtttttaattgctcctgcttcatcatgtttttagcaatgcgatcttctccctccagaattaaccgaatgtaccatatttcattttcaaaaaactccaaactaattgtctgagccgggattgaagtacattcatatgtatatgaatcaaccgaatgcaatgcaaatactaccgcatgaaatcccgatcttaccattttcaatattagagatatgcgtaggtgtacatccgcaaatatcagccaatttttcctgtgtgatattcttttgcttcctggtagcttttatacgcttgccagttaacatcgtatccagtttaatactatcaaattcttcacagtaattttccaatttcgtatgtgcctgcatgttctccacctccattcggttcgatttggtacgttgctattatacttgaacacctccatcatttgaattgtctacgaactaataacttgtcgtaccacatcatattttgtcgaaaaatattgaacccagacatatatttttatgtttcaattcactttctaagcattatcttgtctggtattgtcgaaaatacatttgacaaaccgtatattttattgatgtgtgctaatgttatttaaaatcacttttctaaatattataatgtcgtgcaaaacgacattataatgtatattaaattaaataccactaccttattgcatttatataaagttcgtagtattataatactgtttttaataacaatgtagcgtttttcaatgtcattttatacgacatttatttgaaaggaaattaaaatgaaaaaactatcattatcaatgttagcaaagcagattgtatctgcacgcaagcagcaaaatataacacaaaaacaattatcagaacttaccggtatacatcgtgctatgctagtacgtctggaagctcaggattatacaccttccattccacagttggaaaaacttggagaagttcttggttttgagccaacagacttatttgttaataaaagtcacgtatcaggattagaaaaatgttctccgctaaacatcgctgttgccggaactgggtatgtggggctttctattgcaacattattagctcagcacaaccatgtaactgctgtagatatcattccagagaaagtagaattgattaataacaaaaaatcccctattcaggatgaatacattgaaaagtatcttgctgagaaagagttggacttgacttccacactggatggtgaagaagcatataaaaatgcagattttatagtcatcgctgcaccaactaactatgacagcaaaaagaactattttgatacgtctgctgtagaagctgttattgaattggtactgaaggtaaatcctaatgccattatggttattaaatctactattccagtcggttacacagccagtgttcgcaagaaatacaatactaaaaatattatcttcagtccagaattcctgcgtgagtctaaagcattgtatgacaacctctatccaagccgaatcatcgtatcaacagatgaaacagatgaaaatctcgtaaaggcttctcatacatttgctgctcttcttcaagaaggagctataaaagaaaatattgatacattatttatgggatttacagaagctgaagcagtaaaactctttgccaatacttatcttgcattacgagtttcttacttcaatgaattagatacttatgcagaaatgaaaggattagatacccaggcgattatcaatggtgtatgtctcgatccacgaatcggaacgcattacaacaatccaagctttggatatggtggttactgcttaccaaaagatacgaaacagttacttgcaaactacgatgaagttcctcagaatatgatgagtgcaatcgtagaaagtaacagaacaagaaaagatttcatcgcagatcaagttctttctatggccggatattatgactatttcaatcgtggagattttgcagaagaccgggaaaaagactgcataataggtgtatacagactaactatgaaatcaaattctgataacttccgtcagtcttctatccagggcgttatgaagagaattaaagcaaaaggtgctacagtaattatttatgaaccaactctcaaagataatagcaccttctttggtagtaaagttgtaaatgatttagaaaaattcaaagaaatgagtcaggcaatcattgcgaatagatatgacagttgccttgatgatgtagaagaaagggtatatacaagagatctttttagaagagactaaggagaaacgagcacttaactctctggtttttataaaaaacattcccccatcagtacaatattgatgggggaaaactttatctaattacaactctacttctttcagatatcttctcacagcatcctgccatgtcggtaacggctcaaatccattttcaaccagtttgctcttatcaagtctactattgaccggtcttgcagctttactcagaccatattcttcagtagtaaccgaagttacttttgtgcttaatccatactgcttatagaattctacacagaaatcataccaggaaatgtatccgcccttgtttgttgtgtgataataaccatacttttctgtttcgcacatatcaacgagaagtcttgcaagatcaaagcaataggttggtataccaatctggtcatttacacccttgacttcatcatgtgtctttccgacgttgatcattgtcttgatgaagttcttgccatttaatccaaatacccaagcgatacgaacaatgaagtacttttcaagtgtttcactaaccgccaattcaccttcaagctttgtctgaccataaacattaagtggtttgtaatccttacaatcagattcccacggctcagttccctgaccatcaaatacataatcaatagaaagatacagcatcttacaaccaattgctttacaagcatccgcaatgttctgtgtaccaccagcatttacttttctaacaagttcaaccttatcatcatcttcagccatatctactgcagtccatgctgcgcaatgaataacagcatcaggtttttctgcatcgattacccttttcacagtctcagcatctgtaatatcaagactcgcatacggcatggtgcacacagcactaccatctgctactccaacatatgcttctgcaatatcagaactaactccaatatggcctcttttatttaattcgttcatgacgtcatgaccaagctggccactcacgcctgttataaagaacttcattagtttctctccttgtagttcttctcaatccaattgaggtattcgccggaagtacactcctcagtccatttcttaccttggattgtcaacactttttaggacaatttcaaagagaattc

SEQ ID NO: 227 - DNA, 25049 bp, Thomasclavelia ramosa
  source 1..25049: mol_type = genomic DNA
attaaaaggattgtcacctgtgaattacaggtgacaatcctctaattagaaactatttataaactgtcctgcttgggaagttcagttcaaaacaagttcttatttttgtaaggccaagacaatcaagcgatccaataattccggataagtgatcccgaaatcattcattaattgtggatacattgaaatcttagtaaatcctggcattgtattaatttcattcaaataaattttattagtttttttatctaagaaaaaatcaactcggcttaagccatgaccatcaacagctttaaaaactttaattgcatattgacgaatttgttcttggatttgctcatctaccagagccggaatacacgttttactttcttcatcttcatatttcgattcaaacgtataaaactcaccatgaggcatgatttgaccgactcgtgaaacaattacatcatcattacctaatacagctgtttctaactcaatacagtctatgcactcctcaactacgacatgacgatcatatttagctgcctcacttaatttcccaatcaattcagtctgattatcacaacgataacatccaacacttgaacctgaacgactagccttaataaagcaaggcattcctaattctctaacaatatagtcttcaatttcttcaatctcatcaaaagtatttgttactacaactaatttttcgtcataacgttttttcacatatactgatttaacttgcggaacacctactgtatctaaaatcttttttgtatagattttatccattgctacactagagcccatcacccgacagccaacataaggtaattttgccaattcaaataaaccttgaattgttccgtcttcaccatacattccatgtaatactggaaatgctacatcttgattttttaataatccataaacatcttcaaccatgctactgttatctaaccaagtatttttagctaaatctgtctgcttcgcatcaagataatgccaaccaccatctaaatcaatcccaactaaggtgatttcgtatttattcgcatccaaattgtttaataccgatgtacaagacattcttgaaacaatatgctcacttgattgtcccccacataaaaccaataatttttgtttcatgaaaatttctcctctattttggtgacaacgtcttttaatttcattccatttgagcccttcaataagacaacgtcatcattttgtaaattattctttaaataatttaccacttcttgattatcattacaataataaatctctgccatccctgacaaagcagcactatcgctcataaacttagcttctcggccaaccgcaactaacacatcaatttgtttttccgctacatatttgccaacacttcgatgcaattgctcgctgaattcgcccaattctaacatatccgctaatacagctatttttctacgcgaatacgtagccaatacgtcaatacttgatttcattgaatcttcactagcattatatgtgccatcaatcaaggtaatgttgttttttaattcaattacatccatccgttttttagttaattcaaattgactaattccttgaatacatttttccattggaatttctagatttattccaatcgcaatcgcaacaagagcatttaaaacaaaatgattccccggtactgggacaacaacttgatagaccttcccattataattgattgtaaattcactatgatcatccattaaaataactttttcagctttaaaagcagcagcgcaatcaacaccgactttaacaaccttgaaattatcaaatcgaaccgttgacagcatatcattatcaccattaattactaatgtactgccatcactcattcccgcaacaatttctaattttgcttttagaatattttcacgacttcctaattctccaatatgtgctgttccaacattagtaatcgcgctaatatccggacaagcaattcgtgataattcttccatttcattaagatgattcatacccatttctaaaatcatcacttcctcatcttttaatctcaagattgtcaatggcaagccaatattattattataattaccttctgttttcaatgtcttatactgctgtttaacaacactataaaccatatcacgtgtgcttgttttacccacgctcccagtaattccaacaactttgaccttgcgatgtttccgtaaataatgagccatcttttgcaaagcttttaacgtattatctactaagataacaacatgcttatcatcttcaatcaaccgatcagtaattatagcgctggcaccatttgtaaatgcactttcaataaaatcatggccatcatagcgttcaccaataattggaatatacatcatcccgacctcagcttgacgactatcttggctaaaacctgttatttccattgtttcatcaccactaataagtttcccaccggtagcaattactatctcacttactttcatttcatccccctagaactcattacctttaatcgttggttgattttcatcatctaaaatatggcgcttcccatcaagaccaacaatttcatatccaatcacactatctgagtttcctttagttaacaccagcagcttatcacctacaacctcaaatgtcagactgcctccaatatccatcgtatataacttctttttatcttttccatcaagatccatcgtataaataatattcttatcttgaataactaatttcttctcaaccaggttcactaatgataaattattactttcataaataactttactttgtccttctaaatcacttttaactagcccatcattatttatataatataaatattcaccatcataagtataaacattagtattattggcaagattcttcttgtcgctgccatccaatgcaatcgaaactaattcattatttttattaatataaaaaattctacctttttcctcatcaacaacaatactataagaaacctcatcactaatcttatgatcctgatttgtctctaattcaagacaatgaattgtttcaccatcactatcattttgataatagactttatcaccaagattatgtacataatatacattctttaataaaatatcttctgcttttgtctttttatccattcgaatataatcattattttcatcaagataataataccactgctcatcttcactaaaaacagtaactgcttgttccaaaacaagttcgcgattattaaaactacgatcatatttcaataattcagaattcatcattaaataaacagcatcatcattaacataaccaatccctaaataattaatatttgtcgcttgactatatttacctgtatttttattgattgatattttactatcactataatcattagtgattgtgtttgaattatcattctctgccagcttaatcggattattaataacatattgacgcattactgtcgtcactacaattaaaacaataaaaacagcccaaattttcttactacgccaataattttgcgctgattcattagacttaagcaatgtttgttcagtcttatcagctgcaataaactcatcgactttttcaggttcaataatctgttcttcctttataatatctacttctttatctaaccctaccggcgttccgcaaacaggacatcttttttcatgttctaataatcgcgctccacattttctacatcttttaatcttttccatttagtcacctactttaatgcctacattttaccatatcaccaaagtaaaaaaaagcgtgttattagcgtaaaagaaaagacttcgcttcaataagcttagtctattcttcttcattattattcaatttagcgatagccgtatcataaaaatcatttatataccactgctttaaatactcatcaccatttcctgtactatacacaatataattgcctattacattaaatacagttacatcataatcaatcgatacaatatgcccatcactagtcattaaatcatcatcatagttagtatatacaattgtattatttgtaacgatataattattaacctcaccttcaacaagcagttcatcattttcatcagcaatactataacaatgtacgccttgataatcttgataataaagcaaatctccactcacataaattttcccagtactagataaattaaattgtgataatttatttccggccaaatcaatagcctgaatataatcatgttcaattgttgtataaaaaactaaactatcttgcatgtcataactataatctgaaatttcatcacttatgatttttattgatgttgcacttacctcatcatatataaacagtccctcttcatcatacttagtatataggaacttatttttatctattggtaatacattatccatttcaaaaagggctgtcaattcaccacttttcatatcataacgtgcatatcttccatactgttcatagtaaagatagtcatcagtactataaatatacctttctccgtcatctacaagcgatttaaagttactaaaattccgttctgtttgatatatttgataatccatcccaaaataaatatttgaatccgttaaaaaagcataaccaccattttttaaatttccctcttgcgttatactgctattactatcaaataattgtaatgttgataattcttgataatcccgttgatcattcgaatttttaaaaatttgcccgaaaatagttactcctgcaatcaatatcactacaattccaactataatatttcttagtttttcttcattattagcagccttcttttttatgattggaaagcccatgctgttaattcgctgtctagcttcttctaaacgttgtttgatttcattattgcttgatttgtaatcatacatctcttgttggtggtaaacatggcttttttcactatgtttatcgcagtctttattatttgttgaattatttatgttaaaactactggcgtacttcttagtgacatcagtcttcttttcatactttgttggattcccacaattagggcatcgtggttgaccaaaatgtattgccgctccacaaactgagcaatgacttatcttcccctgacgatgaccacataacggacattttaaactatttttatactcatttccgcaattatcacatctcattgtacctcaccccctattaattatattgtaccatgcccctatttagagtcaatcagccaaataatataaataatttttatcaaaaataaaaagatactgtcgtatcttcttacttacacattttaactccggtttctaatatttccatttgcaataaagtttgttcatctttgacccgaggttccttaccctcaataatactttcatataagccatcaaaaacatttccataatcccctacttcagagatgactttttcttcatgaaaaacacctgcatcatcataatacgataacgttccataatcttcaggacgatcaattccaaaatttggtgaccccggcatataaaataacttgaggtgttcttcttgacgatcttttgtcgctttaacaaagcatcctttatcaccataaacaacaaaactaggacgttcttttactctaaaataacttgactttactgaaactttaagtgttccataatatagatccaaatcaaaataatcattcattcgtcctgatcctaataattgtcttacatcataatgaatcttttcaggtttaccaaaataagaaattacttgatctaaagtatgacatccatgaccatataaatatccattgtacccaacatattcatgaacatttagtggtatttccggacgataatagtcataatgcatttctacttctaataaattacctaattttccactttcgatcactttttgaactgttaaaaaatcagaatcataacgacggttttgatagcattgcactaataaccctttttctttagctaatgcaaatatttctttagcttcagcactatttttcataaaaggcttttcaaccaaacaatttttaccatgttctaaaaccattctagcatactcataatgactatcatgacgagtgcaaacactaatcagctgaatctctggatcgtttaatagactatctaaatcatcagtataatttattcctgcaacacgtgaccaatcatgtttatttaaatttcgagcataaatagtttttactttaatattttttcttgtcagtacaaatggcaattgataacgattagtacttttaccattgccaataaatcccattgttaacataatcttctccttctactttgatatatcatattgtactatattctaatcattaattatattttttacgataattgaaaagatgattttaaacaaccatattaataaccaaacataataacggaattgtaaataatgatagcgctgttgataaaaagacaatttctactgccaaatttgaatctccatcatacttctcagccaaaattgctgtcgtacttcctgctggcattcccgccaaaactgttgctactgcagttactaatggtggtagattaactattgcacaactaaataagaccaataaaggaattaaaatcaaacggataaaactatagtagagggtcaatctatttataacatctctaattttgatttctgccaagattccacctattacaatcattgataaagccatcgtacaattactaagtgactggattgatacttttaaaaaacttggtaattgaatttggctaatcataataaacaggccaataaatactgcgataatgcaaggatgtgtaattactttcttaataacatctttacctttagcattagtaaaacatgcaaccccaccagaccacattacaattctttggggaattaaataaatggaagcaaataataatccatctaatccataaaggccttgaatcaagggtgagcccataaatccagcattggagcagatcgttccgtattgtaaaacactttgttgtcgttttgttgccttaataaagaaatactttccaaatacttggcaagcaaactgaataataatcgaaacaatcaaaattgttagaccactcttgatgatttgagtatccattttaatcataaaagagtaaataatattagccggcagtacaatatatattactaaatccgtcaagctctttcgatgctctttagaaataatatttgtctttcttaaaatatatccaattatcattaaaataaatatttcaaattgtaaatccattaaattattaaaatcaaccacaataacacctctttgaagatatcttaaactaattttcttgacacgtcatctaaaacttaccattattcatataattagttataatataaacaataaaagtaagggtgaaataatgaaaacaaactacgtctatatcgtcaaatgtcaggataatactttctatacaggctggacaactgatctagtaaagcgaatcaatgctcataatcatggcaaaggtgcaaaatataccaaagctcgtcgccccgttgaactggtttactttgaggagtatactgaaaaaagccttgcgttgaaacgggaatacgctattaagcaaatgacacgtaaagaaaaagaattattaatcaacagttagcataggctaagtaatttctttggaaattaaagaataacgtgttatactagattcatatagaaagaaggcaaaatatgaaattaaaccgaaatgatttatgctggtgcggcagccaaaaaaaatacaaaaaatgccatctagcatttgatgaaaaattagagcaattaaagcagcaaggaaaaaaaattccaacccataaaatgataaagacgcctgagcaaattgagggaattaaaaaagccgcagtaataaactcaggtttattagactatattgaagcaaatatcaaagttggaatgacaactgaagaaattgatgttatggcaaaggaatatactgccaaatatggagcagtttgtgctgattatcaatatatgggttatccaaaacatatttgtgtctcgatcaacgatgttgtttgtcatggtattcctaatgagcaaactattttacaagaaggtgatattgtaaatgttgatgctacaaccatgctgaatggttattatgccgacgcttctagaatgtttatgattggtaaagtttctaatgaagctaaaaaactagtcagcgatacaaaaaaggctttagaactcggtatggctagtgttatcccctatcaaagttgtgttggcgacattggtaaagcaatcgaaacatttgctaaagctatgggttatagtgttgttagagaattttgtggtcatggtgttggtttagcgattcatgaagatccttatgttttccattttgagccaaatgtgcctactgttacccttgtcccaggaatggtctttacaattgaaccaatgttaaatcttggtggtcgtgaagtatatgttgatgagtcagatgaatggactgtttatactgctgatgaatcactttcagcacaatgggagcatacgttgttagtgactgaagatggtattgaaattatttcaaaataataaaacctccgatttgaagtgaaccaccattatttagattagacacctaaataatgggattcatttcagtttggaggtcttttattttatatttataattacatactcactaggagcacctgttttgattggataacgccatcccgctattcctgtcgtcgtaattgctgtaaaatcaccaatatccctttgtccacgaatcaacgtatcacttgtcaatgactgaacaattcccatagggaacaattgtccaccatgagtatgcccagataattgtaaatcaattcctagagctgcattttcatcaaggtttaaaggctgatgatcgagcatgatcgtgtagttaccacgtttattttcaggaatcatctctaataattgactagttgacaaacgaggatttgtaccccaaaaacttgcatcttttcgaccaataatatttatattgtctaagctaactactgcatcttccaatacaacgattccatttttctccaacgtagcacgaacatcttcaggaccaaattcactatcgctaaaagcatgagagccattgtcatgattaccataaacatagtagattccttgttgattattgatcgatgctagcgccttactagcattaaccatatcatctaatggggtattttcatcaaagatatcccctgttaaaactactaaatcagcattcagctggctcatttcatcacaatatttttgtagctccgtaacacttaatgatgttgacatatgtaagtcagcaatttcaagaattttaagatcctcaactttatcacttttcagatcatatgttgtagctacaacatgtttaatattatagtagccataacctaaaaataacgccgtaactactattcccaaaataccagtagtaaatgaaatccgataaatcgggaatctttttaagcctagatttaatagctcaaacaacaacatgacaaccaataaatgataataaataaccccatataactccaacgtgttcatcgctggaattgatagcaccattatcactaatccaattataataatgaggaaccaattagtatgaatatttaaaatcgttcgtaataaacggttaataaaaaaagtaaaataaataataccgggtataaccgcaagcaaacccatatataagtacataaaatccctccttttaatttagaatacacgctgaagtatgcttcaggtcaagtaatttttataaaacacatatcttcacatatttatattctaacaaaataaaaagagcatataacaacataatttactaaacaaacaacaaaaatattccaaacagtcttaaacattaccagctttatcctactctctatttttaccgtactctctttttattacccaacatattactaaaaataattaataaatcatatttccttaacaagaaaattttagtttgaataacttatcaaattatcgtaaaaactataatgatagcaaagctatcaacacatttatcaactagaaagagatgaaatatgaagaaacgtttcctgatttttttactaattattgcaccattatgtatcaatgctgttcatgccagtgaagataatgctaaacttcaattattaaaagagaaacattatgaaactgaaggtacaatcgttactgtcaagattccccatgttgttaatgttaaagatgacaaagtaaaaaaagttattaataagctgattacccaggcaattgatgactttactaacgaatttaaagaatttgacaaagaaccaaacacagaacataaattaattgcagatattactttccaaaactactatagtgacgataaaataatatcattttcaattaatgccacccaaatcatggcagacagctatttacaaaagaaattttatacagtagatcttaaaactggcgaagtctacaatattgaacatttcttaggttcagattatcaaaatatcgttaaaaaatctgtacaacaacagattgcggagaataaagaaaaatatcctaacctaatgtattttgatgaagcggttaataatttaaagattactaatgaacaaccattttatatcaacaaagataatcaggtagttgttgttttcaatcaatttgaaatagctcctggttatatgtcattaccggaatttattattaaatagttgataaatctagaggttaaataatattttaacctcttttatatttgtaaatcatttatttaaaaaatatccacgacatgtctaacatcatggatatttataattagcaagtggtatattatttataaactatattgttaacaattttattatttatctgcagcaaattctattcccgcactttgacgagctttagtcgcaatctcaatagtaatcaaactaatttcctgcatttttttagcacgagtaaaatctttttcatcaatcattttaacaaattctacaaattcatgatacatccgatgtttatcattattgtaagaaacctcatcaccttcattattcatttgtttagcactacccttattcattaatactttaaaaccatttaagctattagcaggtgtagaaattgtaatacatcctgcatcaccttgaatatttgttgcaacgggagctttacaatctttagctccaatacatacacatttaaaactatcatagtctaatgttaaaattcctgaagtatcaattcctctttgaatatttgcctcataattgacatttaatggtttaccaaataaagctactactaaatttatattataaatatttagatccattaatgcccctcccgacatggctggattaaatgctggcaagacttctcctgctttaaaagcatcataacgtgatgaatattgtgaataattagcactaacgatcttaatttgtcctagtgttggtaataactctttaatttttaaagtatttggtaaatattgggtactaactgcctcaaccataataactttattagtgtctgctaaagcaaccaattcttctaattctttaagattagaagtaaatggtttttcacagattacatgtttaccggctaaaattgcctttttgcacatttcataatgtaaatgattaggcaccgctacataaactacttcaacctcactatcttccagcattacatcaatatttgtataatgcgctttaatattgttagcttggcacatctcaacaattttttctttttcagccggtgtggcacataaagcaactaactccataccagtaacttcatgagcaaaagttaaaaaatcatgaacgatcataccggccccaacgattccgaccttcattatttagcctcctttgctactttagttgcttcttcgataatttttaaaacttctattacttcctcatcggcaactaatttatgagccccatttacaataacatcatttaaattgtcataaataattccataatccccaatttctgtaggtactttttttgtaatatcattgccattatcatcaatgtaagacaatgttccccatttatcttctggtaatggatcaaatgatacatggatcgctcctggtttaggtttttctgatgaattatgaccaagtgccggcattaagaaacttccttttttgccatgaacgataaagcgtggataatcaagttttacataataactagttttaacaattgctttaaatccatcataaaagaaatcaaaatcataataatcatcactgactccaggattatcaacactacgacagtcatatacaactcgattaggtttaccgaattcaccaatgatttgatcaattggatgaactgctaacccatataaaattcccatacctttattatttgctattgatggtctaaaataatcataatgtgactcaatttccacaatgtctccaagtacacctgattcaataactttacgaactgtgcgcatatcagcatcataacgacgattttggttagccattgctactagacctttttctttagcataatcgaatacatctttagcttctttagcggtcattgcaaatggtttttcacataaaacatgtttaccatgatccaatgcctgcattgtatactccacatgataacgatctggggtattaacaactaccaagttaacatcaggatcatccataatctcattaattgaactagtaaacttaatccccggataccagctctctttttcttcattaatttctgtttctaaacgataaatatactttacatcaatgaagtcttttcttttttcaacatatggtaaatgataacgacaaacgctgttaccaaacccaatataagcaacttttaacatctttctttcctcctattttataggtttattttatgatgaaaaaaacctataaaacagtgattttccagctcttgcaattgaatttcatacatttatttacagtactgtaatttaatttcatactactaaattaaattaatcaagtagcggaaaattttaaatattttccctctcttacaccactgtccatacggttccatatacggcagtttaattaaatttcaatttatatctcaataaataataatctaaacaactaactagtccattgtgtgctagcctttcttttgctacagcacgcacaacacatgttctagttatcacgaattgatagcatatgatatttgtcttgctctaccataatttaccccaagttttctaacaccatgactaggctttggaatttcaatacttttaacaggttgtggtttgtaagaccttgtttcaatttgtcttttatttcatcattggctacattatccacactacttgtgcttttatagacaagtatcatatttttcttagataagacttcctctaataatttgtgtgatcttctccttttcgctttctaatgcctagatccaagtgtatatgcccttcggctcaaatacatttccgatgcactatgtgattcgtcgacaactacattcacaaaggactttcaccctagatgtatgacaagtcgtcatacttaaaaaagatgtctctaacagacatcttaatctagatcttttccatccgatttaatcgctttttgataccaataaaatgaatccttttttatccgatgtaaatcaccaactccatcatcattcatatctacataaataaacccatatcgcttatccatttgtcctgttgtaaatgataccaaatcaattggtgcccatgatgtataaccaaaaatattaacgccctcttcacgagctttcattaggctctttatatgactgcgatgataattaattcgataatcatcatgaatagagccatcatcctccacttgatcatgtgcccccaaaccattttccacatcaaataacggtacttgatatcgatcattcagtacatgtaaaaaatattcataacctgtaggatcaatttgccagccccaatcagatgcttctaaatatggattggctaaactaccctgaccacctgctgttgctaagtttccctctacatcatgcgtagtaaatacatttgacatatagtatgaatatgctagaaagtcagatttaccttccattagaatcttcttatcttcttcactaatttctaaagatacattattatctttccagatacgttttgcataagctggataatatccccttaccatcgtatctgcacaatatgcaaatttttcttgaaacaacttatatgaacctaaaacatcttttggatcacacgtatatggataacagcagaaccctgcaatcatacaaccaactttgatttcctcatctatttcatgagctgcttttaccgcttctgccgccgctaccatttgattatgtaattcttcaaaagcaaactgttttccttctttaacattaaagtgaagcaaaatgttaatttcattaaaggttaaccacttattgactaaatctttatattcaataaaacatactttagcaaattcaacaaactgatgaatcatctctctatttgtccagtcaccataggtttcttccaaatagactggttcatcatatttatacaaagttataactggatcaattccatacttcctacattctttaaaaacattacgataaaattcaactcctgcttgatttactccaccttcaacaccatgcgggaaaattctagcccaagaaatcgtcgtgttaaaagttgtaaaaccaagttcagcaaataaggcaatatcttccttatatcgatgataaaaatctatccctacatgatttgtatatctaacatcatcaaataattcatattttgccccctttggtaaatgatcaaattgtcgcatttttcctcttgtaccatcagcatttaaataatgaatataacgattattagttgttgttccgggatcaccgaaatctacttgaaccggactcttaccatcttcatcccatgctccttcacattgagccgcactaatcgaaccgccccataaaaatttatctggaaaactcatctttattatcctccttaagccttcttttatttttatcttcttggtgttgccatttgcgcccaagtatacgcctttccttttaaagtgattgccatttggtaaatattttccggccaggttccaccaccaaaaccaccatcaccaatagcatgaacatcacatcctgtttgtttcatcatcagcgttatttgacgaattgtatcaacatctgctgcttcaacattactatttaaaaagctcatagcaagagccccatttcgatgcgtaaattcaattaattcacgaatcatctcaactgtaataccgtggcgtgagcccggagcaggaaaatcaataatatcagccccagcctcaatcaactgcttaataatatttttagcatcataatcagcaagtggatcacctaatactttttcactaatgccatcctcccattttccagcaaaaatcagcatatcatcaccacaaatcgctctagcctcttttgtccacttaatcacatctttaattgatgtaccacttcccggattaccacctaaaatgagaaatgatacaccccattgttttgcctttaaaagattttcttttgtacataccatacctgctagatcgtataactgagaattctcttggttattaaaatcaagcccttctttaggacaccccaaataaattcccactggtctaccacctactaaatccttcaattcttggtaatcaaatccttgcatgccaggacaatcagctggatgaaaaaaatcaaaaccattcaataaaaccatatccgcaccaaaagcaaacattaattcggtactggtacaattaggaaataagattggattttttaaatacgtttgtcccatcagcaccctaccttcagatttaaaaattgcttcttttaattctctaccagtataattagaaattttactagcttttgcactaatcaatctagttacttgattatgtagttccatcttttttctccttatatctattttcttacaactaaatcttaatttaaaaagtagtctaaaaaaatcatatatagatattttgtaattaaatttcaaagatataaataattatgaaatttaatttcaaaaatatcattagtagtgagaaaacgttttctctatgtctattaatatgttaaaatataagtataaataatccctaaaaaggagtgcataaaatgattcgtgaattaatcgatagcattaaactgacaaaaaaagaacaagttatttccgaatatttagaacaagagcctgattgcgtgcttcaatataacgctaaagaattagctgctttaatcaaagttagtgcccccacccttattcgctttgttcaaaaattaggatttaaaggctatagtgattttcaagtgacttacacccaagaaaaaacaatgtatgatcaaatgaaaaatatacggattgattcaaaaagttctattcgtgatgtaattgaaaccctacctgcaatatatgaccatgtttttaaagaaactcgaaaactaactcgttttgaatcgtttgttcgaacgataaattatatgctgcaagctaaacaaattgatttttatgccaatgacaataattattcagaagttcaatctgcctgtttaaaactaaataccattggtatcaaagcacaatgctttaacactttgaatactgcctatattgataacatcgatcctcgagacatcttagctttcgtagttagtcactcgggaaaaaatcaaacaatggtcgatgccgcatatgaactccgaaaaaaacgaatccgtgtcatcgcaattacaggaaaaatcgacccaactttagaacttgtatgcaatgaagccttgtatattgattcatcctcacatcatctgcctcatcatattatgctatatggattatcgatacattatattttagatattctcgttacctcactttattacaaaaaatacaaagaataataaacaagaccttacgctcccgtagggtcttatttaaccaacatttccttgatgctgcaaagataaatcagtatactgcataatttcaaatttatttccatccggatcatgaatccacatttgccaagtttctgattgacctttattaggctcaatatcaatttcgataccagcttcaatcagctcttttcgtgcttcaaaaatatcatcaaccattaaagcaaagtgtgaataccctagtctaacatctggcttttcatgttctagctggttatctgctttattaaataattccaaatattgtcccggggctaactcaataaaaatataagcaatcccatctggatcagtaattgcttttttagcccaagctccacggcttttttgtccaagataagccccataacgcataattattttagcttttaatcctaatttattttcataaaaatctctcattttatccatctgatcagtataaaatgaaagatgcatcacttcattaaatttcatttttaacctcgcatttttataaaaaggtctgtttaaataaaacaatcaaagctatttaaacggaaaaatagatttcatgactatctaaacaaaccatttttattatttattttccacctaattttaaagctgtatccaagaccttagcaccattcattgtcccataatcctgcatattaattatttcagccggtttatcaagaaacattttttaacattctttaattcataacgtacttgtggtcctaataaaataacatcagctgcttcaccatatttttcaatttgtccaacaggatgggcttcgatttgaaattcaatttcttttgtttcggcagcctctttcattctattaactaatagacttgttgacattcccgctgcacacactaacaaaaacattcatcattattccccctctagcctaatattcaatattattctctaaatcatcaccattggtagcaatacattttttataccagtaaaacgattttttaggataacgttttaaatcttttaagtcttcaaaatcacgatcaacataaacaaatccataacgttttctaatttctttatgactacttaaaaaatcaattggactccaagctaaataaccaattaaatcaacaccatcatgttcaacagcctgtttaattgctttgatatgctgttgataataatcaatacgttgatcatcatatactttttgatcaattaactgttcatcaattccaataccattttctacgataaacaatggtttatgatatcgatgataaaaatcaattaacgaatatcgtaatccctgtgaatcaatttgccagccccactcatttgcttgataataaggatttttaagattgcgctgatcaaataaaatagcatcctctaaagtaatcacatcatcaatttcatcaaatgaagcctgaacactactgcgataatatgaaaatgctagataatccagtttggtcgatgctgatttaattacctcttcatcagctttatttagactgattgttatatttctatttagtgcatactgcttaaaataatctggtagttctccttgacacatcgtatcaaaagcaaaatagttgtgtaacttatttttaaaatctgcagcaataatatcactacttttacaagtgagtggatagaatggtgcatgcccaatcataccacctactttggcttgtggatcaacacgtttaattacctctacagcacgagcatgtgcaatttgtacattaatatttaattgtacgaacatctctgctttagacattccatctggtaaataagctcctgccaccagatcactttgacaataagctaaattaatttcattatatgtcagccagtatttaacttttcctttcagtctagaaactaccgcttcaacatggcgagcataaaagttaattacttctttgttcataaacccattatagttttttaacagataatccggcatatcaaaatgaactaaagatactactggttcaattccttttgataaaagatagtcgaccatcttttcataataagctaaccctgcttcattaggactttcttcattaccaagcgggtgaatccttgaccatactactgaaaagcgatatgctttatatcccatttgagccatgtaatcaatatcttcttgataatgatgataatgatcagtagctacttttgtatcacaaaacatcggttcaatcccgggttctggagtaactattagagtgtcataaacatttaaccctttaccatcttctaaatatgcgccttcagcttgaacgttgcttaaagcaccgccccataaaaattcttctttcatgatcttctcctttatctcgttgtcatcataatagtcatatgaccatcaaaaacaattttgtttccttgcggaatcaagaaattatcaccgactttaataggcactccatcaacagtcccagagcccctcacaaccgtcgccaactgataattatcatgataatagtgattctcccctgtaagttctagttttgttacagtaaatgagtcattatcaataaaaacagtttgttcaccattttctaatgatgtcattacagtcgtaagcttattttccatctccttttgatcataagacaaacattcaattgcttcttttaaatgcaattcacgttcattgccatttgcatctttacgatgataatcataaaaacggaaagtaacatctgtagcctgttggatttcataaacaacactccccttttttaatgcatgtaataatccagccggaagatatacaaaatcatcaggatggacttctaaatgacgaatcagtttatcccactgttcttccttgatatagtgagtcaaatcagcttcatctttggcattgtgtccataaacaatcttggctcctggctcagcttcaataaaataccaagcttcatttttgcctgcttgataacctaactttaaagccgcttttacatcaggatgaacttggatacttaaatcatcttctggtcctactaacgaaataataaccggaaactgttcattaggatgaccaaataattcttgatgctcctgccataattctaataaagtttttccttgatatggtgcagtctcacaaatatttgaagcccctttttggcagctaaatgaccaagcctgtccaactccatccggaaaatcatgatagccaaaataatctttaactaacgtatgtccccatatagccaagcgcgggatcggtttaaaaaataatacacccataatttttctccttataaaaaataggcattaatatgcctatagtgtaaacaaagcaaataaaccaattacggttacaaagattgataagcaattagctaatgagacaatattagctttgattctaaaaccatatttactataaattaaattatttacttgttttgccttagtgacatgataatcacctaacaaagcaaaaacaacgattacgattcgcattggtaaacttgttccaattccatcaccaaaataattccatggtacgatagctaaaataagtgctaaaactgaagcaaataaagctgcaccaatatatggatttttttcatctcgatgcttttccattcgttcaatatcttttttagacatcttttgttttattttattatcattatatttttgagcataactacgttgttcaactttaattacttcactaccacagctatcacaaaattttgcagaatctttaagtacagcaccacattttcgacaatacataatatccacctgctctctatttcaaaataacttgtgaaaaattaactaaactaacaaaaccactaataacgatcgatacccaagcataatttttattaccatttggttcgaatcctttttttcgatcctgtttatctacccgcaatgacaatacaccacaaacgattgccccaagataagcaaacgaactaagaatatatggaatctttacatttccaccaactgcactaaatattgttcctgcgataaaatccaatccaattaaaccgataaaaaataggaggatccctaatttagcccagctattttcacggggattcttttttaactttgatttgtttttttgtttaagtgcatctgcactaatttctttaccgcaatgataacagaaagctgaatcttgtggtatttccttatgacaatatggacattccataattagttcctccttatttttttattaagagaacttgttaaagttttcttaattaattaattctatgcctctgcagtattcattttagcaacttcagctttttcataagctttccagaatggatagaagataactaatccgattgctagattgataaatacaataatgataccaccaactgaaccaccagcagataaataacctaagattggtgaaggtgttgcccaaggcaatgacatatacatttttcctacaaaaccaatactagttaaccaataagttaaagcccctgttaatgtatgagttaaaataaatggaattaataggaaaccattcattactactggtaacccaaacataattggttcaataatacagaaaattgcaggtggtaaacagattgttgctaatggtttcaaatgaggtaatttcttactagacataaacatgtaaattaaaattggccagcaagatgatacccattgagatagacgacataagtttggtgtccaaacatatggtaaatctttaactaatgttccagcagtaaaagcagtgttgttatcagcaagccattgatttgtaaagacattagtaactgcaccagtaatattgtcaccatgtagaccacacatccatagcaatgctgataagaattgctgcaagctataaacaaagacattgtctgccgctcctaagactggtaataacatttctccaaccaatactggaatattgattccggctaaagttctaattccccaacatacaatcgtaataaagaaataaggaataattgctgagaaactatctgagatagcaggtggtactgaatcaggcaatttgattacaatattcttttttaaacatatattaataatattaattgcaattgctccagcgatcattgctgtaatcaaacctgaaccaccccaataagtactttcgaaagcactgcctccagcacttaaagttccatctttagcagtgattactaaattaccaacagaatcatagtttaataacataaaagcaaagaatgctccgactgcccctgtagtcttattaaatcctttaatttctgcatattctcccccgaaagcgataataatgtagatagccataattcccattgataaactattgactaatgcaagatcatcagcccaaggctttaaaaatggaattaatgctttagttgtcaatccaccatctgaacagaataagtatactactaagaagattgacccaaccattgttactggtaatgctgcgaccatcccatttacgattgctcgtacaaatgggatctgtccaaatcttgtcattggtccagcgattacatcaactttttccaatactttgtccatgaaggactttttttcagtagacatattttttcctcccttaattttcaaaaacgctttaaatgtaaacgttttctctttgtctatctatatagtatacccattcacttattttttcgatatattatcctgtcgtaaattatgccatttttatttacaaatacctcaaacccattggtattattaatgtttttagaaaatagaagtcttaaaaaacaatgagtaaacgtttactttttttactaattttgatatagttttactagggagtgaccatatgaaactaaaaaaaaacgaattaaaaattattcaattattattagcttcaccagactacatttcaacctacgatatcgctacctcgacaggaattcctcgtcgtttagtgcgtgatgaaattagtaacgttagagttattttgtcatcattaaaccttaatttattatccaagccttcaaaaggttattttatcgaaggaaagtcttctaaagatttaagccgattgcaaaacattattaatgataatgagcgtgatgaaaataatgtttttccaactttaccaaaagatcgtagaaattatattgcaaaaagattaattgaagaggccagctacattaaattagaaactttcgctaatgaattattagtaagtcgaccaactgttgctaatgatgtccttcttttaaaaaaagatattcataaatatggtttaactttaattcaaaaaccaaattacggtattagtattcaaggaagtgaaatttcaaaaagaaaagtcttagctgactgggtttttgaaaacttaacacaatcagatatgtttggtgatttcttggatgcctattttaattctccagattatcaaatcattgagatcattaatcagcatcaaatcattatgagcgatattagtttgattgactttttaatttgtttctctatcgctattgcaaggaatacgatcaatcatacgattgatagcccaatcgctaatttcgagcaattcaaggatcgttttgaatatgctactgctaaagaattaggaaaatatgttcaagaacgttttaaaattgatttcaatgaatatgagattcaaaatattactattttattaatctgtaaaaggtcatcacgcggcttatctgcttctcatgatgataacgtaattaccattgctaatgaaattctagcgagaatcaaagcagaaacattaattacttttgatactgataaattatttagaatcctatcgctatatattgaaaatactttgatcagacaagcatatgttgaaaaaatccgtaccccggtatatgagaatattcaatatgaatatcctctaccatatcatttagcatctattgcatcagcaatgattcaacaacactccaagataaagttatcacgtagtgaattatcggcatttacaatactctttaataatgctattaacaatcaaaacaagaaaaagaaaaaagttttattgatcaattgtatgagtggttctatgtttacactacatcgttatcggattgaaactgaattagcagcacaattagttattactaaatatactcaatattatcgaatcaatgaggaggacttaagtaattatgacttaattatttcttcagtaccgattcgtaaacaattatcgattcctgtaattaataccagttatatgattactaatgatgatatcattagaatcaaaagctatttatcttatttgttcaatgatgaagaccttgtttattattttcatccatatctatattcatccaatgttaaagtcaaaagcaaaaagggcgtcgcctcaactttctatcatttattaacatgtctttatccaaatctaaaagatactttcaaatacgagttaaataagcagcatcgttatactttgaacactttcaataatgtgattgggctaataaaactaaataaaccaatcaatgccaataacaatatcgtcgcaattactttaaatgaaccaatcctgtttgatcagcagcaaatgcaggtcattatcctcttttcatgtttagacaataataatattatgtataatactttatttaatacgctgaaaaatgttgctaataatgaacttgatgtaaaaaaattattatctcacttatcgtatccagagtttctcagcgtaatcaaaaacaacaaatagctttaaaagcatttgttgttttttcattacactttattttagctaagaattatattatcaatggcagagattattagtacagggaggcactaatggacaatacaattcactaacagttatttacttttttgtctttcttcaatttctttcaacatatcg

SEQ ID NO: 228 - DNA, 5658 bp, Thomasclavelia ramosa
  source 1..5658: mol_type = genomic DNA
atcaaaataaaactatagtttctttaaaaaaccatagttttatataaactattctaattttaaaccattacttttaataacattttgataccatatatatgaatcttttttatatcttttatgactgcctactccataatcatcttgatcattataaataaatccatatctttttttcatttcacttgttcctgaagaaaccatatcaattggcgaccaggcacaataagcaaaaaccttgacacctcgtgtgattgctttattcaaagcaataatatgttctctaatataatcaattcgataatcgtcgtgtattgtatcattatctaacctttcaatttgaccaattccattttcagcaatcattaatggtttttgataacgatcccaatatttaagaaaacaatcatatagaccaagaggattaattgtccatccccatggattagtctccagataaggatttaattgggaatcgccaatagctaaagtattcttttcatgactgacaacattagaattataataactaatcgctaaaaaatctaaagtattttcttttattaatactagatcggtttcttttatctctacggcgatatgattatgactaaaataacttattgcatatccaggatattctccccttaattgtacatctgcataaaaatacattgtcatttgatttttttcagttgaaaaaacaacatccttaggcttacaagtcattggtgttactaaaaaatcagctagcatacacccaaatttaaagttattatttattttacttccaatctcttttatttttgcacagacaacaaatttattatgaatagcttgatatttcttttgttccaattgtgtcactgtatcttttacaattcctaacgaactgagacctacccgtgttaaattaatctgattaacaggtatccaatatgttactttatccttatatctttgcataatcaaagttgcatattttatgaatgctgtcacaactttttcatttaaaaaaccattatattttaaagctaaatcaattggcatatcatcatgatataatgtaacaataggcactatccccatttcttttaacaaattaaatattttatcataatattttaatccttgctcactaggttcaccatctattccatttggaaatactcttgcccaacttattgaaaaccgaaaacaagtaatccccatttccttaagcaatatcaaatcctctttataacgatgataaaattcaattcctatttttttaggaaaattatatctttctggataattgagacggtctaaaatctccgctttagataaatctcctttcacctttgctttatcatttggatcataattttgcaaatcagcaactgtcaatgctctatcatcagccccctcagcctgttttgcgctcattgccacgccccataaaaaatctttaggaaattgataatatatttgttttttgtatttttctgttagtagcatatttaattctccttatgaccctgtatttggtaaaaagattcaaataatattatcattttttctgtcaaattaacctcactcatgattgtcataagagtatcttgagcatgggtaaataataaacatgttttataatgttcacctgcagcctctttttgaattatttctgtttgttcttgatgtgctttttttatatcctcccttgcctccacaattttcttatgtgcgtttgaaaaatcaaagatactgagtgcctccaatgcttcatttgcttttgttcttgcattgcctgaattcataatgattttcatcgcaactggtattaaaagactattttcatccatttattattcctccacactatatgactaattggttacgttaatcaaaattctttctttaataattctttttcatgttcttctttaacaagctgattatcatatctcattaaaaattgataccagatcaatccataaataataaatagtacaaggaaccatataaacgctcggaaatcatcagtagttaaccaggtgcaaatcggcgcaggaatacgagaaatattattaactccggctggaatatttagcataccagctttcattacaaaccagataattaatggaccaataattgaatttatccacattggaatcattagtaacgggttaaagacaattggcgccccataaacaagtggctcattaatattaaatattgacggtccaatacagattttccccattgtttttaattttttagatttacatttaaataacattagaaaatttaatggtaatgttccacctaagccccccattgcgattaaggccgttgtaaaaatcgtttctgttgtcacaatataaattggacttcctccagccaatgccatctcagcattggctgcaattcccgccattaaaattggtttaacaatagcatttaacgaccaagctgaaatacctactgaatataacaatacgtataaaaaacaaataacaacaaatcccagtaaagattgtcctaaattaacaatcggctggaatattaaattaataaattctactaaatcaaaacctattgtaaatacagttactccaaatattaaatagataattgtcattggaacaatattatttatccattcacaaacaaaatccggcattgtagcactatcttccaaaatatgtaactttgcatataaatggaaaatcaacattacaactaatcctacaataatcgcaataaataaacctgatccacctaaaaaattaatatctgtaaaagtaagttcagttttcccagttgttgcattttttaataaggttgccatagttggacataaggccattaaaaatacagtcactgaagttaaccctgcagttattgtatatttaggatgatccagttccaccatcccaaaataagtaaccataaaagctactatcaatgacatcattccaaagctaaatgtattaacaaaactcaagtccggtagtgatggaatgtaacgtacaaatacattgtaaattgaaataactgatcctaccaaaataaacggcaagattttctgcattgcgctcgccactgctgcaatccaaggattactgaaaactttttgcatccctggtgctaatttattagtaaaccaattcataattcctttcatttttctctctcctgttatatattttatttataaaactcttctatttctaataatgctaattcaagtaatgcttttccatctaacattgaataaatttcttcaggaataacaattacaggaatattatatggggctgccatatctttaaaagcattcagcctaaattcataatgcggtccaatgcaaagaatatccatttttggcaaatattgtgtgacttcgctttcactctttgcttcaatagttgcatctattttacctttttttgcagctgctcgagctttttgagctaaaaatcctgaagagagccctcctccacaacaaagataaatatgtgcttgtgccatttttatttcctccatttcttatttgtctgcaagttcttgaactttacgcttatatttaatcattttgttcatatctactcaactaacattctgcacagtgcaaataagtattttgcactgtgcaaaattctagttttaaataaaaattaaaactattataatatagaaaacaacaactagggaaggatgagagcatgagaaggaagcaagaagaattgatcaattatttatatactcataatgaaaaagttacagcaaatattctttcaaaagcattaaatctctctattcgaacaattaaatcatatattgccgaattaaacatgaattaccctagcttgatttcttctagcaatcgtggttatgtcatcgataaagtaaaagctaactcactacttcaatataaagacgatattcctcaggactatgaaagcagatgtatttatatcataaaaaagacgcttttagaaaagcaggactatattgatatttttgatttatgtgaggaattattcattagctatagtactttaaaaaaagatatttataaaatgaatacttcatttgcaaattttaaaattactttttctagtgaaaataataaacttcatgttggaggttctgaacaaaataaacgtaaactaattagccatgtgatgtcagaagaagtaagcggaaattttcttaacttaactttgctacaagaaagtttcccagattatgatcttgatgatgcctgcaccctaatcaaagatatttgcaaacagcatcactactatcttaacgatttttcttgtgttaattttattttgcatgtaactattatggttagtcgaatcaaccatggtaatcacattattaacaataatgaattaattcaagttactaataaaaatgatgaaaaaatagctaaagaactatgcctagccttagaacaagtctttaatgtctcttttaactcatcagaaatacttgaaatctatattctctttaaaaataatgcaaattatataaatgatgaaaacgaaaatgtttctttattagtatcagatgaaattattcaaattaccaaaaatatcataaaaaatgttgatgaacatttctttattaatcttgactccgataattttataactccttttatgctacatctaaaaaaccttaaaaatagattaataaaaaacaatcttcttaaaaatccaatgcttgattctattaaaatatcatgcccaactatatatgatatctcaacgtttattgcttatcagctgacattatcatttcatgaaaacgtcaatgaggatgaaatagccttcattgctttacatgtaggaacagagatagaaagacaaaaaaaagaagaaacaaaagtatcctgtctcctattatgtcctgaatatttaaatatcactagtactttacacaaaaaaattatgatggattttggagatcaattaactattcaaaaatcaatttcatttgaaaatgagatcctagggaataattttgatcttcttatcactactgttcctgttttagaatctacaaactactttaccgtattattaccaccattcccaatgagctatgagaaaaataagattttagatgcaatcattagaatagagaacactaaaaaaagtcaaattcttactaataatcttaatttttattttaatgaaaaacttttttattcaatgaatgaagatattagtaaatccgctgttattaacgaactagcagaacgaatgattaatctaggctatgtagaagaaaactttaaagaagagatatggaaaagagaaacagcaagttctacagcttttatgaatattgccattccacatcctatgaaaatgagcgcttataaaactagtataggagtggtaattagtcataaaggaattgactggggaaaccagcattttgtcaatgtagtttttatgattgcttttaataaaatagataacaaacattttcatgcattgtatgaatctctagtattattatttaatgaaccaattgtaatatcagaaataaaaaaatgtaagaactttaatgattttaaaaatatcgttataaaaaactatttaaaattcaatgaacgataaaaaagataccagtatcaacacactagta

SEQ ID NO: 229 - DNA, 4065 bp, Thomasclavelia ramosa
  source 1..4065: mol_type = genomic DNA
tttatcaaataaagtagagataattattaataaaattaaaaataataattatgaaaaaattggtcaaactaatacaactttagataagcaaaaaaagataaaattatcaaaagacttatctaatggtagtgagataaatgttatcgtaaatataataaccgctgagcaatcatatgaattggttaatattaaccgttatgttcaaactggaggaattagttattctgagtatccaatctatcgttatggagatatttaaaaaaagatcgtaatgatcttttttactattttatttcaatgagttcgtattcacgagttccgattccaattttttcaccatgttctaaacaagatttccagtttgtttcaggtgatacgtcagtaaagtgatcatgatgatgatgaccatgtttatctaacaaactatttgcaatagcaggctgtttattaacagcatcagcacaagccatatctaaagcaacgggatcaaatgaggcaaacattccgacatcagggacgatggcaatatcattttcactatgacaatcacaataaggtgatacatcaataaccaatgaaatatgaaaacatggtcgatcttgcacaactgctttagtatattcagcaatcttatagtttaaaatgtcattagcttcatccatgctggcaacgattgcatctttaggacagactccaatacagcgaccgcatccaacacatttatcatgatcgatagaggctttgtgatcagtaatacttgtcccgttatgagcacaaattttaatacattgtccacagccaatgcacttatcttgctcaacgacaggtttgccagcactgtgcatttccattttaccagcacgggaaccacatcccatacctaaatttttcaaagcaccaccaaatccagtcaattcgtgtcctttaaagtgatttaacgaaatgataatatcagcatccataatagcttgaccaatttttgcttctttaacatattctccattgattggaacgatttcttcatctgttccttttaaaccatcagcaatgattgtgtgaactccggtttggaaaggattgtagccattagaataagcactgtctaaatgatctagtgcattttttcttcctcccacatatagagtattacaatcagttacgaaagcttttccacccaattcttttacatagtcagcaacagctttagcgtaatttgggcgtaaaaaagctaaattaccgggttctccgaaatgtactttgatagcagtgtatttgtttttaaagtcaatttcttcaaaacctgctttcttcattaaaaacttcagtttttcaggaagattcattcttcctgtatgcatatcacaataataaacttttgctttttccataattacctccatgatattatgtccttgtataatttaattttagcactatttattgtaggctaaaagctaaatcaattatatcttacatcttaaagtatgctttaacgcaatataaatagcaaataattacaacaaaaaaagagcatctcaaatataaatcgagatgttcctttaaataaattattaattattttcctcagcagtatcattagtcaaattgaatttatctaataagtagaaagttagtgaaagaatcatagcaacaatacaagctagcaccattccagttaattcgacaccaccaaagcttagcgtaatactgcttaatcctgtaacaaaaacaactgaagttaagataaggtttttattagttgcgtaatcaactttttgatcaactaaaattcttaatccactagtaccaatcattccatatagtaagaaactgattccaccaataaccggtccaggaatagtttgaattagtgctgataagggtcctacgaatgaacaaataatagaaagaacagccgcacctgcaattacttgaacactatatacaccggtgatagccataaccccaatattttcaccatatgtagttgttggaacagaaccgataaatcctgaaatcatagttgaaaaattatcaccaaataaagaacgatgtaatccagggtcttctaacaggtttttaccgattatttttcctgtaacaatttgatgaccgatatgttctgaagtaattacaagaagaactggtaagatcatcaagatagcgttaatatcaaattttggagttgagaaattaggtattgcaaatagtggagcatttgctacagttgtaaaatctactaatccaaaacaaattgctgcaatatatccacagataattgcaataagaattggaatgacacttaaaaattttctaaaacaaatatttccaaaaattgcaactcctagagtaattaaaaatacccaaacattggccatctgaatattatcaccaatcaagcctgcattatttgcagcagtagcacttaattctaatccaattaatgcaactactggtcccattgcagctggtggtaaaacaatatcgatccattttgtcccacattttttaataattaaggctaataaacagccgcaaaatccgactgctacgaatccccccaaagcataagggtagccaaatttagaaatgacaatatttgctggagcaataaaagcgaagctagaacctagataggcaggggctttcccttttgtaataacaataaataataacgttccaataccgttcatgaataagacgatagctggatttatcccaaataagaaaggtactaaaacactggcaccaaacattgcaaacatatgttgtaatgataatggaatcagtaattttcctgggactttatcctcaacttgaataatccgtttattagacatacatgtcctcctttttaaccttaaatattatgtcattatttagtgatactgtctataaaaatcttcttattttagtttaaaaaatttaattgttcaaatatttgattatttcctttatcgcttggttgaacaatatgttaaaatgatggtgcaggaggtaaaactatgcaattagaagaactggtaaatcagtattatgatgatttaaatgaaaatgatttaatgatttggaaatatatattagcccataaaaaagagtgctgtgaaatatctattgatgaattatctaaacgttgtaacatatcacgggcaacaatttcaagatttagccaaaagatatcttttgagggatttcgtgaatttaagatgcgtttaaaattagaatgtcagcaggttcaagtaaagaatgatggaatgcttgatgaaatttgtaataattatctaaaaagtatggaactaactaaagatagcgatcttgatgacctctttgaacatatacatcacgcacgtaggctctttgtctttggaactggtgagacacaaaatacagtagccgaaatgattaaaagagtttttcttcaaactaaagtatttttcgtcaccttatatggtaaaagtgaattaaagatgactattaacggtttaggagaacaggatgtaatgatttttatttctgtatctggtgaaaatgaaatggcaattgaggcaatgaaaacattgaaaaataaaggtacttatattgtttctatcactaaactaaataataatacactagcgcggcttgctgataaaagtttgtatgtaattacagatcaatacaaaagatttaataatcgtacctatgaaacgacttcagcatattttaatacagtagaaattttatttcttaaatatctagattatctggataatttagatgagtaaaatatttctgcacaattttaagtttgagaacccttgaagtttaattttaagggttttttattaatatttactgtacttatgcacagatcttgtgcaaaggatataaatgtgaacctcttctttaaatacgcttaagatgttgaatcaaaaattatttatattacaataaaggtacattaagatcttagtgcagcaaaaaataaattaactctcttgggggtcatggaatataaatatatatttagcgcgaatgttatttatattggatgcatagagggtttctaaaacttattaatccatg

SEQ ID NO: 230 - DNA, 1569 bp, Thomasclavelia ramosa
  source 1..1569: mol_type = genomic DNA
tttgaattattaatacattgataatatggataatggcattatgtatacctataccatattgccattatcatttattacaaatgaaaagggagagatatatatggatgtatgtgcaatgaattgtcattatcgtttttatacattagaagatttttttaaaaagtctttcgaaaatggatttcaatatgttgaactttggacaggaccgatgcatttttatttggattataatgggtatgatccagttgaaaatttaagacaattggaacgtaaatataaattaaaagtaattggtgtttgtccagaacaaacaaatccaaaaccgaataatatggctgctaaatctacaaaagaacaagaaagagtatttgcctattttaaaaatgcgattgatattgcttatgagataaatgcgaatcaagttgttgttactagtggatgggcgtatttattagaaaataaggatgaagcaaaacaaagaagtgcaaaaatgttgaatcgtttggctcgatatggagcatctaaaaatattcctttagcgatagaggctttacagccaatggaatcaattttggtgaatacaatttcagacttaaaggattttctcgatttagttaatcatgataatttaaaaatctgtttagatttaggagcaatggcaaaagctaaagaaaatataaatgattattttgaagcttttggaagtagaattattcattgtcattttgttgatgggaatccaactggtcatatggcatggggagatggcacacgatgcatgtcacaagatttaaatacattaaaaaaatataactatacaggattgctttcttttgaaattgttaatcgtgtgtattatagaaaaccttttgaagcagataaaaaatcaaaatttttatttgataagtggaggaaagaaatatgttaaatattgctaaaaaattagactatataagagatcctcaagatgattttaaaacttatttggataaagcaaacaaatatggatttcgctgtatttttgctagaacaaagcaagaatatgaatatgctgtgaatgctttgaatgatgatattattattgccggtgcaatagattttccagaaggtgtattaacattagaagaaaaagttaataaatttaaagaatatgcattaatagggtataaagaaatagattatgtattaaatcaaaatgcagttgaaaatggaaatctaaaaaaaatagaagaagaaatgttttctattcatgaaatatgccagaaatatggaatagctgaaaaagttattgtagaaatgtgtaaacttgaaggtagagacaatataaaaagagaaatttgtaatattgccaatcgtgtaaaacctacttttttgaaaacatcgacaggaagaagctttcgaggcgcagatttaaatgatgttaaactaatgaaaaatattctagatgataatatatgcataaaagcttctggaggaatacgaacatatcaacaagcagaaaaatttttcaaatcaggagcagacgttataggtgcatcatcagcaatacaaatagttgaagaatcaaag

SEQ ID NO: 231 - DNA, 971 bp, Thomasclavelia ramosa
  source 1..971: mol_type = genomic DNA
aaattctctttgaaattgtcctaaaaagtgttgacaatccaaaatgcgacaggttcaagaaatgacttactttacaaatctgcctaaggaggaatttgaaaaaagaaagatagaagatttgtattcaaaacgatgggatattaaagttgcgtacaaaacattaaaaactcaattagaacttgaaagaaatgtatcaactaatgtttaagttgtacaaacgagtgtatatgcaaaagttttgttttacgctatatgtaattgagttgaacttaataattaaaagaaataagaatttgacactctcatttctttgtttctaaataatctataatatctataagctgatcaacgataaattgagcatgactttgatccattccaaactttttatcttttaatgcaataacatcaatctgtgcattatttcctgcttgaataccccaaaaagaatcttcaataattactgtttcttcttttgaaacatgaagttgttcaattgtatagagatagatttcagggtttggtttactttgtttaaactgatttccactggttattaagtcaaaataatcttccaactttgacgtagttaatgcataatgtataagttgttgacttgatgatgatgcaagtgctattttgtagttatgtaactttaaatagtcgagtagggagaaaatatatggattgagtatggcttggtaatctctttttaaagaggcataatacttagttaataaatcattaaattcttctcttgaagttttttcattccaccagccatacacaatatctctaaacttacgattatcaacacatatcacttgtttatattcatcaagtaataaatcaatgtcatattttttataaaatgccataagttcattcatatacattgtttcactatcaaagataacaccgtccatatcaaagataacagttgttttatgattcatgattaataatctaat

SEQ ID NO: 232 - DNA, 744 bp, Thomasclavelia ramosa
  source 1..744: mol_type = genomic DNA
agaaaaatgttaaatttcgatgaaaacagagtaagaacagaacatcaaaatggagtaaatttaatccctgaagtagaaaaaattgttgataaagtttgtgaagatgggtattcaaatatcttcttatttggaattggtggaacattattatatgcaggacaaattatgcatactgctaaacaacttggttgtgatttaccaatttatttagaaaatgcaactgatttcttatatgaagggaatgctaaatttaatgaaaaatcaattgtagttattgcatcattatcaggtaatactattgaaattgaagcagctattgataaagcacatgaagtaggagccaaagttatgggatatgttgaagttttaaattctcctttggctaaaaaagttgattatttagtaaatacattcggtggtgaatattattggtggtattcagttgtattacgctttatgaaaaatgcgggacaatttgataaatatgatcaattgatgaatgagattaaaaacatgccagaaaatgttgtacaaatttataaagatgctgatgctaaaatggaagcatacgcaaaacaatattgtgatgaaccaattacttatttagttgcatcaggaaacctagaagattgggcagtgtgctatggtatgtgtattatggaagaaatgcaatggatgcgaacaagaccaatttcagcagcaaacttcttccatggaacattagaagttattgaaagagatatt

SEQ ID NO: 233 - DNA, 631 bp, Thomasclavelia ramosa
  source 1..631: mol_type = genomic DNA
tgctcgcgtctcaaggcgctgctttctcttcgttcaagctatcgcttttgactctcgccatccctcaaagggatttatttcctcctttctccttttgttatcttcttctctcttttttgttttctttcttcatttctttatcttcaaatggattttgatattcttttacactcaatttatccattgctatatcatgtccctcttgttcccttatatattttgcgactgtttgatcatttagtcctactgtactcacataatatccttctgaccaaaaatgtctatttccatatttatatttcaaatttgcatgtcgatcaaatatcattaatgctgacttacctttcaaataccccataaatgatgatacacttaactttggtggtatcattaccaacatgtgtacatgatctgacatcaaatgcccctctataatttccacccctttatattgacataatcttattattatttctcttatatcatttctaagttgattatatatcacttttcgtctatactttggtgtgaagacgatgtgatatttacacatccacttcgtatgtgccaatgaatttgttttttgtgccatacttaatcacctttcctttcttataatgacagcttgaac

SEQ ID NO: 234 - DNA, 587 bp, Thomasclavelia ramosa
  source 1..587: mol_type = genomic DNA
acttgtggtcctggtggaattgcttatggcatgcgttctattggcggggttattgaaattctggattacatggaaaaatattctccaaatgcctggatgttaaattattctaatccagctgccatcgtagctgaagcaacaagaagattacgtcctgattctaagatcttaaatatctgtgacatgccaatcgatcttgaagaaaagatggctaacatggtagggttaaagtcacgtaaagagatgtctgttggatattatggattaaaccactttggatggtggcataaaattgaagataaagacggtaatgacttaatgccggaaatcaagaagcatatggcagctaatggttttgcagatgcactgtcaggaacgaatcagcacgtggaacaaagctggattgaaacattcgcaaaagcaaaagatgtttatgcattagatccagaaacaatcccaaacacatatttaaaatattatttatatcctgattatgtagtagaacatactaatccggaacatacacgggcaaatgaagtaatggagcatcgagaaaagaatatctttacagcttgtagaaagatcat

SEQ ID NO: 235 - DNA, 380 bp, Thomasclavelia ramosa
  source 1..380: mol_type = genomic DNA
gttgaatataaaaatgtgatcagagagtatattgaagcaaaatatggctatgaagtaatcaattatggtactgatagcagtgaaagatttaattatccagtttctggtgaagcggtcgctaatgcagttgtaaatggtgaggttgataaaggtatcgtaatctgcggaacaggcgtaggaatttctttggctgccaacaaagtaaatggaattcgctgtgtgacatgtagtgagccatattcagccaaattatcaagagagcataataatactaatatgctggcttttggcgcacgagtagtaggaattgaacttgcaaaaatgattgttgatgcctggttaactggtgagtatgaaggtgggcgtcatcaagttagaat

SEQ ID NO: 236 - DNA, 374 bp, Thomasclavelia ramosa
  source 1..374: mol_type = genomic DNA
gtaccactataatcaatcttttcgttttctaaataactataatctaatttataaatcatattatttctaatcaatttataatttttatcacctggaatatagatataaatcaagtgactcaacaagttgtctaaatgatgttttatttctgaatccgcattaattttttctcctttatcaccatttttaaccaaaatttcaaagttagcataattcactaaaggaattgtttctgttaaaacaaaagtataagcattttctttagtcattggataaatactctgattattaaaaacatcaacaatacagatatttacttgagttatatctgtataattatttaaaacgcatttataattaatactcattgtcat

SEQ ID NO: 237 - DNA, 346 bp, Thomasclavelia ramosa
  source 1..346: mol_type = genomic DNA
aaacagaggagaaaaagaaaatggaaaagaaatattcagttgttattgctggtggtggaagtactttcacacctgggatttgtttattattgttagatcatatggatcgttttccaattagaaaaattaaattttatgataattttgcggaacgtcaagaaaccatcgctaaagcctgtgaaatttatttaaaagaaaatgcaccagaagttgagttcgcttatactactgatccagaagaagcttttactgatgttgacttcgttatgtgtcatattcgtgttggattatatgcaatgcgtgaaaaagatgaaaagattccaatgaaatataatgttgttggtca

SEQ ID NO: 238 - DNA, 330 bp, Thomasclavelia ramosa
  source 1..330: mol_type = genomic DNA
aaaatcagaatcttaaaagaatatcaatttattattgctatctcaaaaagaataaatatttcatttatcgttaattttggataaaatgattaacacaaataaatttattatgatgaaaataagaattgattaattttatctaacgattttcaaatatttttttattattaatttgttttttaaacacatcgaactataaaaacattagttatttactgttaaaatcatcagataaaacagactattatcttaatagctcaaatacctgataattactgtcaattcgtcgcttttttatttgaaacaacaacaatttatgatataattcgg

SEQ ID NO: 239 - DNA, 302 bp, Thomasclavelia ramosa
  source 1..302: mol_type = genomic DNA
gatgagatggttaatgaagcacatcgaattttaaaggaaattgataatcgagtttatgtgaagattcctgtatcatatgaaggaatcaaagctatcaagattttaaaagcagaaggcatcaatgttacagcaactgctgtttacgacctgatgcaggcatatatggcattggcagccggagctgattatattgctccatatgttaatcgaattgggaaccttggtagtgatccgtttgaattaatcaatgagttgtcaaatcgaatcgtgatggatgattatgattgtaagattttagcagc

SEQ ID NO: 240 - DNA, 244 bp, Thomasclavelia ramosa
  source 1..244: mol_type = genomic DNA
gctttataataacgtctaatatcaattggatgacgtctacaatgttctaagtgtacatttaatctcataaatgctgatctcatcatgataggagataaaattcctctaaattcatcacttattccttttaattcataatcttttgtatcaaaaacagtaacttttgcactgactctatgaacaaagttttctacacgatccatttctggacgagttttatcttcacctttaatcaaaataactg

SEQ ID NO: 241 - DNA, 173 bp, Thomasclavelia ramosa
  source 1..173: mol_type = genomic DNA
ttagtagtagatgcatggataacaggaagctatcaaaaattatggcaagcaatcacattatcaaaaacagtaccaagtgcaagagtagcgaaattaatcttagatgatttaattgaagcgaataaagatttctggcctgaattgaaataagatgttaaaactatttaaaaaga

SEQ ID NO: 242 - DNA, 181 bp, Thomasclavelia ramosa
  source 1..181: mol_type = genomic DNA
agtttcaaaggtgtccagcaagtaagagattcttttaatagtggagcccaagcaattacagcaccagtcagtgttctaaaagcgatttttaataatccaaatattgaaaaagctgtagatgattttaatcaagactggtatagtgtttatggagaaaataaaggaatttgtgatttataaa

SEQ ID NO: 243 - DNA, 173 bp, Thomasclavelia ramosa
  source 1..173: mol_type = genomic DNA
atacatggaatctctaccattgccgtacggtcaaagttttctactgctccttcattcggtacgatcaataacattttttctttagtgtttttagcaattgcacaagctaagtcaacaatatattcagcatgcgcatctggttcaaaccctccgtctacagctgttcctttttc

SEQ ID NO: 244 - DNA, 157 bp, Thomasclavelia ramosa
  source 1..157: mol_type = genomic DNA
ttgcttgaatagctcagttggtagagcaatcggctgttaaccgatcggtcgtaggttcgagtcctacttcaagcgccatggcctgttggagaaacggttaactcacatgcctttcacgcatgcattcacgggttcgaatcccgtacaggtcaccatt

SEQ ID NO: 245 - DNA, 143 bp, Thomasclavelia ramosa
  source 1..143: mol_type = genomic DNA
ttacctgttcaaattgaaaatttgaacatatagacttaagtcagttgagcatacgaagtatgcgaaataaaaaaccacctgctatgcgggtggagcaataaagaagttatacaaagatatcacctttccgatataatggagtt

SEQ ID NO: 246 - DNA, 109 bp, Thomasclavelia ramosa
  source 1..109: mol_type = genomic DNA
atcctatattcaactggtgatacatatcctaatgatccatgaatgcgaatgttattataccagtttacataatcaaataattctaattccagctcttcaaaactattaa

SEQ ID NO: 247 - DNA, 105 bp, Thomasclavelia ramosa
  source 1..105: mol_type = genomic DNA
ttttacaatagaagggttgcttgtcactcctacgattggcatatgatctatagcatctttaatttcctctaaattcacagtatcaataataaattccatttttat

SEQ ID NO: 248 - DNA, 3195144 bp, Bacteroides thetaiotaomicron (residues 1-1,597,572 of 3,195,144)
  source 1..3195144: mol_type = genomic DNA
aagcgttgctttttaaatatattattcattggccctggtttgtaggggcagtgttactatgccttgttggtgcgtggttttatctgcattgggctacacctgtttataatatttcagccactgttctgatgaaagatgagaagaagggtggaggtgcaggactttcttcggaattggaggatatgggattaagtggtctgatgacttcttctaagaatattgataatgagttggaagttttgcgttcgaaaacgctcgttaaagaggtggttaatcaattgggactgtatataacttatgcagatgaggatgaatttcccgctaaaggtttatataagacatctcctgtccaagtgagtttgactcctcaagaagctgagaaactaagttctccgatggtagtagagatgactttgcaacctgaaggtagtatggatgtgaacgtgactgtaggtgagaaagggtatcagaagcattttgaaaagttacctgccatttttccaactgatgaaggtacattggctttctttcaggaagttgattcggtaactttacaggatggaacgaaggttcctcggatagagcagagtgtacgccatataactgcgacaataaacaaaccgatgagagtggcaaaaggctattgtaacagtttgtctattgctcctacttctaagactacttctgttgccgtgatttccttgaagaactctagtttgcagcgtggacaggatttcatcaatcagttgcttgaaatgtataatcgcaatacgaacaatgataaaaacgagattgctcagaaaacggctgagtttatcgatgaacgtattggtattatttcaaaagaattgggtagtacggaagcggatttagagtcttttaagcgtgacgcaggtatcacggatttgacgagtgaagctcaaatcgccttggccggtaatgctgagtatgaaaagaagagtgtggagaaccgtactcaaatcagcctggtaaatgacttgcgtaagtatttgagaagcaatgaatatgaagtattgccgagcaatgtaggtttacaagatgctgctttgatcggtgcgattgaacgctataatgaaatgcttgtggaacgtaaacgtctgttacgtacatcaactgagaataatcctgctattgtgaatctggatacaagcatacgtgctatgaaagccaatgtgcaagctactcttgaaggaactttgcaggggttgatgatcactaaatcaaaccttgaccgtgaagcgagtcgctattcccgtcgtatcagtaatgctccgggacaggaacgtgcttatgtaagtattgcccgtcagcaagaaatcaaagccggattgtatctgatgctgttacagaaacgtgaagagaatgctattgcacttgctgctactgccaataatgcgaagattattgatgaagcgatagctgacgatattccggtatctcctaaacgctctatgatctatttgattgcattggtacttggtgttggaattccggttggtatcatctacttaattgaactgacaaaattcaagatcgaaggtcgtgccgatgtagagaaactaacgagtgttcctgttgtcggtgatattccattaactgatgagaagaatgataagaatggttctatcgctgtcttcgagaacaagaataatctgatgagtgaaaccttccgtaatatccggaccaaccttcagtttatgctcgataatgatcagaaggttatccttgtgacctcgactgtcagtggtgaaggaaaatcattcgtttcgtcgaatttggctatcagtctttctcttctgggaaagaaggtggtgattgtaggtcttgatattcgtaagccgggtttgaacaaaatattccaactatcaagtaaggagaaaggtattactcaatatctgtcaaatcaggatattaacttgatgagtctagttcagtcctcggatattaataagaatctgtatatccttccgggcggaacagttcctcctaatccgacagaactattggcacgtgatgggttggataaggcaattgagattctgaagaagaattttgattatgtcatccttgatacagctcctatcggcatggttacggataccttgttaataggtcgtgtagcagacttgtcagtttacgtatgtcgtgctgactatacgcataaggcggaatacgcattgatcaatgaactgtatcatgagcagaagttgcctaacctttgcactgttattaatggtgtagacttgaagaaaaggaaatatggctattattatggctacggcaagtatggtaagcattacggttatggtaaacgttatgggtacggctatgggtatggtcaagaaaagaagaagtagatatttggtatactatcaaggactatgataaggagtttcaactttatcgtctggctttcccaaatgatgaggttcgttatggtttccttaaaggaatatagaccgatggttaaggaatgttatgtctgactagctatgtgtcgttatcgtaaatataaacctgagtccgatagaaagaagtttggttgattgcgtcaacagttcttctatcggtctcaggttgttttatttaaacccgtttttcaatgtaaatatctcaaacgtttttaatggtatgagcaggtgtttttccgaaatgcttcttataattatcgcggaagtgatccatatccttcattccgatattctctggtatttcgtttacgcgatatttcccactctctaacatttcatgtgctttttccatgcggattttgagaatgaatttgttaagtgcttcacctgttaattgcgtccacttgttgtaaagactggtcctgctaattccaagctctttggcaatggagcctatggttagtttttcattattcagattctccagaatgattttagtaactttacttatcaaagggtgttcaccatcctgcaatatttctgacgcttttatctccaaaaactcttctccaaacaatcgttgtagaaatgattttcgaagaaaacgattgttcttgataaggattgacatttcaatctttaaatctgctatactaaagggctgttgcaagaatgtatcagctaaagaagtctttcttctattgtattggtcaatatctatatgcgaactataaagaatgataggtatgattgatgtttcgcaggatgttttcaatcttgacgagagttcgacaccatccatgttctgaagttctgtatcacaaatcactaaatcaggatattcattttttatgcaggtcatagcttcgccgccatctctgaaacttttaatagtaaattcttccgttaaacaacttgtcagataggatcggaaatcatcattactgtcggcaagtacgactgtcggtttgtgggaatttcttttgcagggagcctttacgagcaaacggtctatcttttcaatttcagtatgattggtgaaacacagcggcgaatgatttgattggtcttcacaagagcatttcacaggaaatcttaatgtgactgtatgatttatattgcttactaagatcttgccattacacaaatctgctagtttcttcaataacatgcttttggaaaaatggcattcaaattctgctttctgtcttatcatccggtgtttattctgattataaagctttgttagtttaccatttcctgaatcgggtacacttatttcccaatgttcctgactgatagaaattagcaatgttatgtttgactccggctcagaacagtcgatcgcgttcgttatgaatttatcgataataggtgagattttgtttttgtccaaccatacactggcataagtgaattctgtcttgattattatttttatgtgtttgttcgttgcataaccttgtagggagcaaattctgtttcttaaatagtttcctaattcatgttcggtaatgtttaggacttcgggatgattatgcaaatattttaatccggacaatttgtccagattctcatttaaacattctatatttcgaatagccagtgacaaatcattctttatgttctcgggacagttatcattacagatcgttcgtaaaggaacatgaactaatgtaattggatttcgaatactttggaaagaatctataaaatactggttctcttctttgaggaaatttctttctttttgtatggaaagataatgaaataaatgccagtagagaaagaaacctgctactatcagcaataaaactaaatatgattgattttcaaatattgttgctattaagaaagatgcagcaatagatattgtctttaaatacatcatgttattatattttaaatgacgtcactcgatggagtttgctttttctttctgattcaagagacatgaaagattatgtgccaactatgattccataattgtgcacatccataaactcaaataatatgatctctaatttgtttgttttgggggaggtcaatatttggttatgagttatgcttattgagaattcagattctaaatgtcttgaactatcaataaaaaagcaatgtcccccaagtaacaataattattttcatttatttgtattaggcgtagtaaactagcctcaggtgaataatcaggggaggaggtggtctaatattaagtatgctatcggaccatgatgtctcaatagctgtttgtttgtgctcaatcatgaattaatatcaaataaaatacatttgtccccttctgataaagtaggaaattgtatttacgatgtaaatgtaacttgtaataacataaaaacaatagttttgtttgtgtgatttgacgaattgttgtagaattatttatttaattgattaatcgaagcagaaagttgtataatagatttagattaatactaaatgtattgtatatgaaatgttggaaattctatatgtaagatggaatgactggtttttgttttaaaatatgaatataaatatttgatattatattgtacttatatgtattaaaaggtgataaatatgcaccttcgttcggtaaatatcgaaggattggggtgttttttcctgtctgcccaaagtaaaggtgaaaccccgaatccaggtggtggatcgggtgacgatgatgaagcatcggactcgacagtataatgggaaagtaaggtagctcattacaacagagtgattataaggatggggcttcggcctcattctttcttataagcttttcgaaagctaattaaagtttcgacttatttacaagtaaataagagtatgcaaataacaacaatccttgcttttattactgctatgggcggtctggaagcggtgaatggatagtacgatatatcttctgtcgtaagacggatgtcagagaagaggaagcttcggtctgtaatctggaagaagaaaaccgacgtaagaaggtggactggctggaagatcgcttgactcagcgggatgaaaaaacagatggcctctatatcgaacttcgtaaggaacaggaggagaaaataaactggatacataagtgtcatgaagtggagctgattaaaaaggaatctgaagtgaaaaagtgtgagattagaggatgcacccaaaggtttgcttcagcaggtggttgccggtagcggatataggtggatgaagagatatataataagcattgattaatgaacgatattaaaaatcgaaagttatagtaatggaatatagaaataatgattatctttgaatcacaaaaaatgaagaataatgatggatggcataatgcgtaaacttccaattgggatacagacttttgagaaactccgcgaagggggatatctttatgtagataaaacggcttttgtatggaaaatagcttctacagagactccttatttcctaagtcgcccccgtcgttttggaaaaagtcttcttctttccactttcgaagcatactttgaaggcaggaaggaattgtttgaaggacttgctattgccgaacttgagaaggaatggaagaagtatccggtgtttcatttggatttgaatgcagaaaaatatgattcatcccaagctttggttgagattcttagccggcatttgacgcaatgggagttgaaatatggaaaaggagaggatgaggaaactctttccggacgttttgcaggagtgatccgtcgcgccagtgaacaggcaggctgtggagtagtggtattggtagatgaatacgataaacctctgttgcaggctttgggtaatggttctctattggatgattaccgtaggactctgaaggctttttatggagtattgaagagttctgaccgttatctccgttttgtatttctgacaggtgtgaccaagtttgcacaagtcagtgtgttcagtgatttgaatcagttgaatgatattagcctggattttgcttatgctacattgtgtgggattacaaaggaagaacttggctcaacttttgttcctgaactggagcgacaggcggcagtcaatgatatgacttcagaagcggttatggaaatgatgacacgacgatatgatggttatcattttcatccgaaaggtgcgggtgtgtttaatccgttcagtgtgctcaactcattttcaaaacaggagtttggtagttactggtttcagaccggaacacctactttccttgtcgagttgctcaaagagagtgattatgacctgcgcactttaattgatgggatagaagccagtgcatcttcatttatggaatatcgggtggatgccaacaatccgattccgttgatttatcagagtggttatctgactatcaaggactatgacaaagagtttcaactttatcgtctggctttccccaatgatgaagtgcgttatggctttctcaattttctggttccttattatacaccggtcaatgaagatgaacagaatttctatataggcaaattcgttcaggaattacgtgccggagaggtagatgccttccttacccgtcttcaggctttcttcgcagattttccttatgagttgagcgattcgaccgaacgtcattatcaggtcgtgttttatttagtgttcaagttaatggggcaattcaccgaagttgaggtccgtagtgctcgtggacgtgccgatgcagtggtgaaaacgcctaaatatatttatgtgttcgaatttaaactgaatggaaccgctgaacaagctttgcagcagattgatgagaaaggttatttaattccctatcaggcagacgaccgtgaagtggtgaaagtgggagtggagttcagtgcggagaaaaggaatatagatcgatggctgttgtagtgcggagatatgccaggcatgttttcgcaaattttatatatatatggagaaaaaacttgtccaaggttgattattttagcttcccgtttcctcttcctgtcccttttttcgtcttaactagcttttctttcttataaatctcttcccagtactctttaatcatgatttaatcttgtcctttcattcctaatgaagatggcgcatctttgcatcgttaacgttagcgaagtaataatcattagtatttatcttaaaaagaaaggaccaaaattatggcaattagatttagaagagtgtctcgtttgtgtgaccctaccaacaaagaattaggaaagaaagtatatccggtaatctcttatcaatacgatacgagtgcaactctgacagaaatagcaaaagaaatttcctccaattcgggagtaagtgagggtgaaacaattagtgttttaaaggactttcgtactttattgagaaaaacattactggcggggcgttcagtaaatatcgaaggactgggttactttttcttgtctgcccaaagcaaagggacagagaaagcggaagattttacctcagctgatattcaaggattacgcatctgttttcgtgccaactcggatattcgtctgtctaccggaacatcaactcgttcggatggcttgaagttcaaggatctggatcatattaataaatcggatgttatcggaggaaatccggatgacgggaatgatggagaaaacccgaatccgggtggtggatcgggtgacgatgatgaagcaccggacccgacagtataatgtgaaaagtaaggtagctcattataacagagtgattataaggatggggcttcggcctcattctttcttataagcttttcgaaagctaattataaagtctcaacttatctataagtaaataagagtatgcaaataacaacaatacttgcttttattactgctatgggcggtctggaagcagtgaaatggatagtacgatacatctcctgtcgcaagacggatgccagaaaagaggaagcctcggtctgtaatctggaagaagaaaaccgacgtaagaaggtggactggctggaagatcgcctgactcagcgggatgaaaaaatagatggcctctatatcgaactgcgtaaggaacaggaggagaaaataaattggatacataagtgtcatgaagtggagctgattcaaaaggaatctgaagtgaaaaagtgtgagatcagaggatgtacccaaagaatgccaccttcggattattaaataatgactaatatatgaatatcatgagaaaaatagattctattattatacattgttcggctacaaaagtcgggcaggattttacagcagcagatattgaccgttggcatcgtgaacgtggatttaatggtatagggtatcactatgttgtctgtctggacggaagattggagagagggcgggatatttctttggcgggggctcattgcaaaggctggaatgagcatagtatcgggatatgctatattggtgggctggatgtaaacgggcatcctgcggatactcggacgaaggctcagaaaagggtgctttatcaattgatcatggatttgcagaaagagtatggtatccttcaggttttgggacatcgggacacttcgccggatttgaatggagatggggtaattgaggctaatgaatacgtaaaggtttgtccttgttttgatgtgaaggagtttctgaaaagtgggagggaagccttgtttgtatggttggtggctttaatgattccttttttgtgcttggggtgcagaggtaagaaggagattgtctgtaagagccgggagattaaagttgattcgagttctacggtcggacgcaggaacagtttgcttcagcaggctttcatttcgagaagtgattcggaagtagtggaagagcatttggaacagatcgttttcatatatcctgtggatacggcttcgcaggtttctgtgaagatcgtgaagaattctcttgaccgaaggacagggaagctgcagcaggtggttgccggtagtatgtcagcggaagaagattctctgtctttggagtccggggtagagttcagaacgagtgaagaggtgaagaaaactgtttctgtgaaacgtgtcaataggtggaaaagagggatatttatattggggggaatagctctgatttatggtggatgtagatggatgagaagatttaaagtataaaccgacctgtgaatttcaacttccatctttttttagtaattttgcccaatcaactcaataacaaataaataatggatgaattaaacaatggggaacaagggcaatatgttgaacccgggaaaaatgagaagaaaaataatacacgaaaaattgtaaaaaggactttgcttacggcaggactagctttggctgtatacatggtatactccatcgtttatctgtttatttcgcccgaccgtaatattcagcagatctatctggtgccggaggatgcggcatttattattcagtcatctgctccgattgaagattgggaaaagtttagtggaagcgaaacttggcaatgtctgagaaaagcgaaatcatttgaagaagttgcgaagagtgtagaaaagcttgactcggttgtcaaaagcaataaagtgctgttatcactggtcggtcagcgggatctgcttatctcacttcataagacccgcgctaccgattgggattttctgcttatagtagatatgcagaaagcttctaaaatggatttattgaaagatcaggtcgaaacagtgctggcaatgtccggctttaccgtcactaatcgaatgcataatggaattaacattcttgaaatgcgtgatccggatacccgtgatgtcttttatacagcttttgtagataatcacctggtaggttcttatacttccggactcgttgaatctgccatcaactcccgtaataagcctaagatcggacttgaccagtcttttattgaaacggaaaaattagtttccggtaaagggcttgtcagggtatttatcaactatgcccgtattcctcagtttatgtctatttatttgggagcgagaaatgaatatgtcgatctgttcagtaattctatggattttgcgggcctttacctgaatatggataaagaccggatggaggtgaaaggttatacgttgaagaaagattcggtggatccttatatcactgccttgctgaattcgggaaagcataaaatgaaagctcacgagattttgtccgggcgaacggctctttatacaaatatcggctttgatagtccggtaactttcgtgaaggaactggagaacgctctgtctgttcatgataaactgttgtatgactcttatcagagttcacggaaaaagatagaaagcctgtttggtatttctttggaagagaacttcctgagctggatgtccggagagtttgccataacgcaatccgaaccggggttattaggacatgatcctgaagtgattctggctattcgggcaaaaagcatcaaagacgcccgtaagaatatggagtttattgaaaagaagatcaaacgccggtctccggttaagataaagtctgttaattataaggactttgaaatcaattatgttgaaatgaaaggtttcttccgtctgttcttcggaaagctgtttgataaatttgagaagccatattatacttatgtggatgattacgtcgttttcagtaataaagctgcttccttgctttcttttgtagaagactatgagcagaagaatttactgaagaataatgcaggatttaaggatgcttattcgtatatgaaatcaagttccacaatcttcttgtatacagatatgcacaagttctactcacaattgaaacctatgatgaatcctgctacatggaatgaaatacaatcgaataaagatgtcttgtattcattcccttactggacgatgcaggtgatcggagataacaatctggcttctctgcagtatgtgatggattaccgtccatacgagccggaagaggtagttgccgttgtcagcgatgaggaagatcaggatatggacgaagaggctgtgaccgaaaaggagcagatgagcgagttaaagcgtttctatattgagaagtttgaaggaaatgttctgcgtgagttctatccggaaggagcattgaaaagcgaagcggaagtgaaagaaggaaaacgtcacggacgttatcgtgaatatcacgaaaatggaaagctcaagcttcgtgggaaatattcaaataatcagcctaaaggcacatggaagtattacaccgaggaaggtgaatttgaacgtaaggagaagttttaaatgaacttctcctgataggtatatatcttatttaatattttcttctgtgctgggacaagaagttatctataaagcggacgatataaacgacagcaactccggctatgaccaatacgataatacgactcaacatagtttttgattttatatttaacggtgtacaaagataaataagatatatgatatatgggatatcgggataagaaaaaataattcaaccctagaacagggttctgaatagtacttttataaattactgatttctagctataaagaaaaatatgaataaaaaagtgtcgaaaagtttttgagttctcgcaaaaagcactacctttgcatccgcaaataaggatggttccgtagctcagctggatagagcaacgcccttctaaggcgtgggtcaagcgttcgaatcgcttcggaatcactattaacatccggtaacagttaaatgttatcggatttttcttttaaatagctgatattaaacgttttactttcgccccgtttaacttttaataacctgcctgtgtaggcatatttgtaggcatatcccctctacaggcataaaataggcatataaaaatgacggcaataagagttgtaagacaaggcaaaaaaggcaaaaccgaccggctccccctgtatgtggaattttatatcaaccgcgagaaaataagaatcgcggtaaggttaagtgtcacctctaaagaatgggatgagcaaaacgaagtgataaaaggccgggacaaagaaagtaaggataaaaatttaatcatctccaatatccgttcacgagtaagcgatatatttgtccgtgcccgtcttaaaaatgagacgctgacaaaagaaagtttcttccgccagtataacaatccctccgattttggtaccttctttgattttgcacgggtttacctcaaacaaattagcaaaactatttctttcggtacctggaaacatcacgtttctatcatcaagaaactggaaacattcgcacccggccttgtattttcagagattacccacgaatttctcctgtctttctttgcatatcttcgcaaaataggtaacatggattctacggcatggcgtaacatggctactatcaaaatatatgtaggtgccgccatacgtggcggttatatggaccatgacccgttcgcggccataaagatacgtcgccccaaaagtgaagttatatacctgacggaagaagaactcctccgcctgaccgctttgtaccggtccggccgcttggaagaatgtacccagaacgtactccgtttttttctgtttctttgttttacttctttgcatataggcgatgcaaaagcattgcagataaaccagttcatagggaatgaactacactacacacgaggcaagaccaaaataccggtaactgtacctttatcggacccggcacgttatatctatgaatattatcgggccggacgtacaaaaggcaacctgtttatgaaccttcccacggatcaggatataaaccgggtactgaaaactatagccggtaaagtaggaataacaaaggatatcagttcaaaaaccggccggcatacattcgctaccctgtattataagaaaacacatgatatcgtaacactatcccaccttttgggacatagttctataactatgacaatggtttacgcacatgttctggaggatgaacgcgaagtgggaatacacgcctttgatgatatgttataaccccaaaagtgagggggaaacgtgtttcctgcttcccccttcacttttctactccaacgtataaacgctccagtctatcgcctttttaagtgcccagccttccttttgtgtctcctgtatatgtttcacggcaccggtgtaaaactcttgtagttgctgcatacttgcaaactcgtaaaacgtcgggttgtcttcttccccgagcttgaaagtaacaggaaggttttccccgcctgtctgcaaggcaagatcgtacgccgtcttataattcatctggttctccatggaaagccagactttcaggccgttccatacgtacccgctttcgatcgtgtcggttatcttccggttataccattcattaataaccgccttgatttctgccagtgcgggtagatgatcgaacgtctcttccatgtaactacgttgcactccttcgggtgtctctgtttcctggtaatcccacgtaatacgccagattccccggcggcggttggtacatcttaccggttccgccttgctgtctgcataaattcgtatcatttcaagtaaaatgtataattatcaatcctttttcacttacttcaccttcgcaatgtgcttcaaaaggcagttctccgtcttttgccgctgattcacaaatgaaaagtgtttcctccaggctggtaaaatactttctctccttgccgtcgagttccagctttataacagtccggtttccgtttttcgtcggcacatccttttcataatcaagtacgatcacatctttgttcatcagttcgggcgacttgatccttgtcccggtaaatcgtttccgtccgtctttaggcttgtacttgtagcccaaatcttttaattttttcattttctttcctgttagtttataaaataagttcttgcaatcggcatgtttcgtaagcccgtaaaatgaagcggttaactcctgcctacgtttcttgcttttaatcttgtgcatcttgcgggcgaacttttgtttgttacgcttccttaaccgtacatgatccgggcgggttacatatcccagaaagtcgataccttcggtgatcgggaaaacggtatcattgcttttaatctccaggcgagctttccgggtctgttcatgaatgatatccctaaccttccaaaggtatttcttactaccggaaagcaccagaccatcgtcacaataccggtaataatgtgctaccgcctcctgatcctttaaccggtgatccaggtaaatggatagaagcaaattacaaagcccctgtgatgatcttagcccgatacttacgcctttaggcatcatgcggatgcactcttccaggattccgatcaatattttatccttgaacatccttttcactgcatccagcaaaacgtcctggtctacgctctcatagaatttcgttatatcgaactggtacccgaacagggttccttcgggatcatcctttatatctttaacgatatactgtaaaaggtcatgcgttcccctgtttttaatggatgcggaagtagtccggataaaacgtactttcaaatgccggtccaccacattcataacagcgttaagaacgatcctgtcctccagggaaaccgcttgtacgatccttaccttcggcccgtcgtctacggtcatttcccgatatcctccgagcttgaaccgcccgctcctgatccgtttcctgatcctctctactgccttcgggacatccgccagtattctacgcccggcaaagctgcgctttcgtcttcttttacgcaataccgtttttatggcgtcctctatattggagtcctcgacaatctcttctataatattatcttctctccacatgataataaattagccttcaattccccgggccgggcttcttcgaaaaaagttcctaccaaaccccattgccctgcgctttatttttcccctttccagccgtaaacggctgctgttggcgaggctcattcctcttggctccacgccggggacacgtccccactgttgtacgccaatttttaaggcttatgcgctttttctttatcctaattgtttgcaagccgaacgccgatgttcgcattcgtgttcgatgaatcgttattcgcgttcgcatacgaaacaccgcctaacgcgttcgcgttgttgttcgaccgatacaccacacgagtgtatatgaggaaatccgcctttgtactttcaggaagcaccggcacccgtcttacttccggacgcctgcgctacccgcacaacgttttacgttgttttttttatcttaatcagcctgatttatggctttaaaggccgcgacgctgcccgcccagcgtattatgcccctgaaggcaagccgaacgccgatgctcgcagccgtgtacgatgaatcgtgatacgcgctcgcaaacgaaacaccgcccaacgcgagcgcgttgtaggacgaccgacacaccacacgagaaagcccggtacccacatagaacctgtcgaaccaatgtgaagaagtggaaccgccttctttggctgcaatcaaatccatataccggccccaaaccatgtgggtaggataaatatccgcattataaacagtaattccctgtacaacgcgttccgttccgtccggcatggtaataaaccaccttccgtccgctgccgtcttgtttaccgtgacatactgcaaccattccgccttatttccctggaaattttcatatcccagtacattgacggactgataatttacaccgtcccggtaagcaccttccgcctgtggattggaaccgcctttttccttataataagaaaccgtatcacgcatccccagtgcatttgtaaggcccgtcactttttggtaattacttgttccatatccgcaaactccctgcgaatcggtattaccgtatttaaagaaatgcagattacccacatccttgtgcatctcccagtcgaacagctggaaacctttgcccctgttctgggcgtatttgattgcctggctctgtgaaatggttcctacacttgaaacaccactgacagaacgcaatacatcatcaatcaagtaagcttcataagcaccgcccaggcattccgtatgctctacccagtccggctcgatcgcttccacactttccgacgttgtgagtaaaacgaaatcgaaggccgccgaattaaggaaagtaaaggccaggaaagtagcccctgcgggaacagcacaaaacaggtacataccattaataaaaccgttcgcgtttgaaacgcttacccgacttactattttgcccgtatcatctataaatgcagccccgtaaagagtggaagccagaccggggaaacggacctgcttgtaatcccgcacgtccaccagggcgaacgatccggattcgtattcattcttcgcctcttcaagggtcgtgtaatccgtattcttacgaatcccgatcccttccgttacctccagctcttcgcgggtaagttttacactggtgtaccctgccgctgccggcgcatcctcattgcttgaaataaaaccgtacagacattggttcagcacgtccgttactcccttgtaccagtaatgaggctcatatacgtaaacttcgccttccgatccggttaatactgcatccgtggcgttctccacgctgtcactgtcggcgtatttgttccggctctcatcatgaagcggataacaggtcatttcaccctccgccgtctttttggccagaacgcaatgtcttttcgccaacacctccaggatatgggaagacggggtaaattccgtattatagtcatatccggtagagttatccaggtttgtaatcttttccccgtcctctaccgtctggtctatttttatgcagacaaactgcggctgaatgatattcagttccgggaagtgcgcacaggtggcggcgtactcttcgtccgacatggactgggtcagccggtacgtacccaccaggcggcacgtctgcacgtttcccccgtcttcatcaacaccgcccattgtcataagcccgcgaagcaaacttccgtccccgtccatatctataccggtaattcgtagatagctggtcgcgctgcattgctgtaacaacgtgttccagtcgatcaggctacagttatcaatcacaaggcgcgtgatatttgccgtgctttccagctgcagccctgcattggtcagtttgttcaggtaccggagctccagcgtctgcaaagttgcgggaaggacgcaaacggccagaggcgcaccgccggcgaatgtcacaccggtaagggatgtatcaccggccaggaaggtttcaagtttggtgttgcttgaaaggtccataccggtaaaggaagaggatttaagcccggatatgtcgagttgtcgaaggttacggcaattacccaccagaagggcgttaagtgtcatctgtccggcctcacagctaacattcagttcacgcaaggccgtacagttgttcaggttcaacgtgccgacaatggcgtgggctacatccgtcagatcaagcccgcgaatacggcttgcaccgtagaaatattgcggatcgtttactattaaatccgtgtccattgtcagttccaccacagccccggccgtttctgcaagtaccgcgctttggtgcggtgttccggacgtgtaaccgtacccgtaataataccgttcggaggccgtaatccgaattttccggttatcgctgccgaacttatacccgaaataagccgcgaagctgtcacgacgataagtaccggccacgtattgactatccagaagggcgaaacggttctgaatggtataagtacggtgcgcgtaacggcttccctgcaaggcatacagataattataataactggttccgctgccggttgtcaccccttcggtaagcggaaggatatatttatattccgaatccttgttataaatccgctcgcaccagttgcccatttgttcctcgttaaatacttgcaggacatattcaaggctcatattgctacgcaaggtttccgccacttcacgcaatttgtccggacaagaccgtaccagttcccataaaacggaatcatggccggcaaaagcataactaccgatactatcgtcaaaactttcgtgggtaatggtatattcgtatttcagtaccgaatcattacgcacaccgaacagcgtgtccatatcgtaaggaaggaaataccagatcagagagtcccaagtcgccagcatcatgttttttgcccggttatccacagccataaagtaatcggtaatcagataccatgcaaacgggctgtcattaccgaaatactggttatattccgccaggaacttggcgggatcatccttacatgaatcgatccagttccaaagccttgtaactgccgccttgtcgtcctcgtgtgcatccgcccaggtagtgtccgccttgaaacgaaattccagcgcatcatcaaaagaagacatgtcggtagtcccgaacagacaaagggcctcggagttgttcaggaactccagacagatacatttgttacgctgcccgttcagggccgcttcgtcgttgaatccttcaattccttcaaaaccgtaaatgatcgcactttccgacttctcattattgaaattgtattttcccagataagtattcgcaccggtgccgtcgttgtcataaaacaggtccatagggaaaccgtccacgcctatacgtacgtcatattcccccttatatgcagcctgcggcggtgtcagccacccgcacctcttccaaacgtcgttcacaatacgcaccgcaccggtattatgtgtaccggaagaatcggaaaagtccgctttcaaacagaatatactgatcggccgtgctcccggtttgaaactgtattcaagggacggcacatccacgccgttaacttccagcgtggtaccgtatttttccaggcgcaagaaataaagacggtaattcttacgcggataagtggtggatgatgcaccctgtattcttagaccgacattccttgctacaaaatcgtactccttaccctgcgggctataaaaatagatatcgaccggtacctcgaatttcttgttattggtggcgttgacaaggttcacatcgccgacaattcgcataaccgcctttccctgggcgcgtaacttgtctatgtcgatatccgtaccgttgtcccccgtaacatcattcttttcaaataacaggaccatttcgtccgacgtagtccggtctaccatgtaattgttcaattcttcatcatccgtaagcgcacggttataaatacggaaattcctgatctccacatccgccgtatcactgaacaaacggatgttcaccggttccgcctgcagtaatccttcggtagccccatactgcaccgctccgcaacggattccgtttacataaagttccagcaaccgcttaccggccttggccccgacaataaaggccattttcaggttcatatcacttgcaaacttcgtacttacttccgtaccgccggaaacacgcataagggcctgctccgttgtcatctggaaaccgatatcgccggccatacagtccagtatcaccccctgccggtccgttaccgacgaacaaagaatttccatttcataggtagccccggtagtggttgcatccgtggagaacggccggtacccgatttcaatcttcgcgcctcccgtaagtttcagggcgtcacccgtccagccgttgctgctccagtcgaaaccagaaaatgtcgtatgtatgtcgccataatcccaggctcccggatcggattcgctgttgctccgcccggctgccgaaagtttcagtacaagcccggcggtagtttcctgcaagtcgatcccgctttccgttacgtcgatataaaacgggtattccgtggcccccgtcttaaatttcatagtgatctcgccctgctccgtaaaacggttggtatatgtctgcgtagtacgggccacactgacagactgcgttttcaccccgtcccggtaaacgtccatttgagccggcgttgcgtcaggatcataagccacaaagtcaaattttacctgttcgtactgccccgcttccaagcgcggaacaagatggtcctccgtaaaaatacggccgtccggaaaactcatcatcgtgccgatgaacggtgccgatcctccggatttcagaatatcaatatagatactttcagactttaacacgagatcggcggaagcctccatttcggcaaccatttgaacggtattccggccggtcacaagcgaagagggggacaaactgaaactgccgtttgtcgttcccgatcttgtaatggtgtgcgcgttctgttgccggccgttcagataaagcgtgacgacctttgttccggaaccgctcacggcataagggatattaatcgtgtcggccagggtataaccgcctgcggctatggccccggccagattgtaagagctggtaagggaaaggctgacaaccttcacggatgtaaacgcctgtcgggtctgtttcttgccggtagtcggatcggttgtggttgccactacgtaaatatcggtattcccaacaagcaagtaacttgaaaggtccagttcgtaactgcctttggaaacatcgctgaccgtctgggaatacatggtagttgttccacgcctgatcgtaacggtgatatccgccttttgcccggtagattcccccttttcatcccccgtggtgtattggtgatcgtatgtataagtaagacgggcgtttccgccttccttgattatggcgttatctacagccgcattcaagacaattttagtagccaccgtttcgccggaacctccaccggaaccggccgggatatccacggcggtaatttccgcgccgcttttgttctggaaagacagacggacggatgtttcatcctcgcttacctccgcatttacgttaaacagcgtggaagcgtccacctcgttaaaacgggcggttactaccttgttttctaccggattggtggaatcggtggacaaagtctcgtccacttccaggatatccacgtttacattcacattaccggccgcgtccggcgtctgcttctcgccgtttaccgttacgctctttaccgttcctttgccgccgaactcttcccagctcgcctcctggtcccaggcatccagggcggttccggtaaactggtacgtctcccatttgccgagcgatgtttcaaaggtgatgacacgcccccggccgcgccacttctccggtaccgcggcaatggcggaagccagggtatagaaaccttccgtaagcggcacactgccggttacattataggtattcccgccgcctgaaccgccgctgccgaaatcctcccacttttcgacattctcaaaatccgtgtccggattgcctttaaattgtttcgtcacccagccgtcggcagtgaggaaagaaaggatcacgccgtttttccggacatcgtcaatcttccccgccgttttcaatgctgcaaacacccccgacagatcactataaacgctgccggcgttcaagaggttgtttacattggtaaaggtggaagacagacgcccggcagtttcctgcaactcctgtttcatttcgtcacggtctgcctgcaacgtgcttatgtcctcggaacaactgctaatatcctgggacagacttttcagctttccccaaagggaaccgtcttcactctgtgaaccgtcttcgctgccgatacgggcgttgatatcggccagcaatgcggccagcgaatcactgtctttaagcccgtccagaaaagcaagaatttcgttaaagttgtcgattgcctgcgaagcgttgttgccgacaagccggtcgatacgtagagaaacggcgtcgatagccttctgcaaggctgcatcggcggcaatgcgggcggcttcctccgcctcgatttccttaccctgggaaaccagtttcaggtgttcgttcaagaagccaagaaccgccgccaccatttggttggtaacgctttccgcgtcctccgcggtttcaatgactataataagatcatcgatatactcctgtgttgccatatagatacattaattaaattgtttactgaactctttggaatgaacccgcggtttccggtagccgctttccgtgatttctcccgtccagttggactccttctcggcaaacgtgagctttaacgtcacgttctgcggcgcgtccggacggacacggtaagaaaactcttccgccgaaggaattaccttgatctcttcccggccgtaacctgccaggtagacatcatcggaggaaagcaggtcaagaagaaagcgtatttcctgcgggcgtttgaatcccgtcttaaccgttacggcttcctgtatctccgtacgtatgcgatccgaataataatcatcggtaatttcatcgtaacgccggaaaacagcgtcttcgtcttcatccatgccgggagttacgctcgcctcgccttccagggaaaacacctcgtaaaccccgtaactgttcaggaaccggagccggtaacgctcgcggaccgtcgggctttgctcgatcccgatccggagagcgaacgtttcaccgctatacacgtcaaaaaggttggccagtaccccgtaatcggtaaagaatttaagtcttacggcctccaggttcaaggcgtagaaattccctgccgtgcctggtactgcaaggctttgtccggtaagaagttccgttattttcagctcgtgctccggatagatgaaacagagcgggtaaagttccgtctcgcgcatcgttatacgccagtcattgctccgggtggtaaagaagaaattgcaggattcattcaagaacttcaaagaaaagatgttattaccttcttcatgcaatttcttaaaagcccgtttggatataccgccacgccaggcagtaacaaccaaagtggccgtttcttcctcctcattttgaagggtgatcgtgacgaccgccttgttataccgtttatcggaaaggcttatcaacatctcggaactgtccgttaacgggggaatatcaacaaaaagcgtttccaggacctccgcgatattcaccttgaaacttccattaccgttaccggtaaatatggaacgcataaattcaaagttcacgaaatacattatattgtaagtcgccatagaagtagtttctaccgaaagataaacagggtttccggtaaaggcgttttccgtcggatcaatgtttgctgtcaaactcataattcaaaggtgttaacgatgaatattccgttaaactcactcttattttcaagtccggaaaggaaacgatcacgctgatccgtgggagacgtcaggaacttgtaaaagtccgagagccgccccgcatggttttccctccaaagcttataaagctccgtcacctgtgaagatgacggggcaaggatgatattattctgcttttccatgctgcaaaagttgggtttatcaaaggaagaataaaggacgggatcagctaagcaccctcgatgcgacaaaccttacctggtattcgacttcttccgtttcgtaacaaaaatagttggccgcgccggaacgctcgtttacctcgatttcaacctctatcttacatttgtaagttttttctatgatgttatcctgtgcggtgggcggattttttaatatatcctcatccgttgacggcgtaacatacccgtcatatatcgtattcgatacacggcaaccgtacacagcatacatccagtgataacggtaataatcttcccaatattccacccttccggcctgtacactctgcaaattggaagaatatacgacccacacgtaggaagcaccgccccacacgggaatgccctgttcattatccagattatagggaccgatcagacgcagggaacgcaacgtaatgtttaccggtaccagtttacccgcaggaagcgaataggaaaggccgtccagaagcatgtactgcccccgcagggctaccggggtcaagacatccattttcataagctggtgaaccggtaaaagggtgtttgtgtccacctggttaaaagagtgccttaatacggcgtcatacttctgccagaacttggcaaacagaccgtcttcaaactggaataaaagcgatatcgtatgtttgctgccgtcttttaacgtaatttctccgccgtccggagcgtatggtaaaatagaaccgaaggaataatccgtactttccgtaacggcctttgtaaaagcgaaagcgaaggaaagcggcgtctcctccttttccgaatcctcttcatcatcggaagaggttttcaggtaggtataacggtgcacatacccggccaggtaatacggggaaagaaggccgttcggggcaaaatccataaacacgcattcatcatcgctcgccagctcctcgtcctctacgttttccgtcttccggtcccagttaaagaaactggatgatgataacgtatgcttcttgttgcccgaatcccatttgtaccagttgccggtggtcttctcgtagttcagccacacggaggcctgggaaggatcgaaacggcttacacggataaccattttttcgttccccttgatatagtcctcgtaccgttccaccgaaggcgcggcaccggtaaaagacgttttggccgataactttatctgacgggccgtttcataattgataaggggttccgccgtcagattccgggacagatcaacggcaggttcatcttccattatatcccggatcagtcttaaagtggccgttttcgtatcggaagagacattataaaccagtccgaaacgtacatacagcgcgtttaaaaagtcctcaatcgtacaatccggcattaaatcggcataattgaggatacccgtcacgcaacagtcggcggcattgttcaggattaccaggctggaaagttccttgtccgtcttaaaaggattttcggttatagtataaccaaattctgaaaatataaagtccaggacacggtgcacgtataagaagggggccacgccgtacccttccggtaaactcgtttcggtcggggtatcatttatcagtagtgtttccgtccttgcctgatagcataaggcatattcaccgtttgaatccaaagtgatacggtttatgtattgcgggtaatacgtgccgtccttggaatcatttttgactactatttgaaatatggcaaaatcttcatgggaatccgtgaagaaccagtttatagaggacataagaccgctaacggtaccgccgcttatgctgggtaatgtgatcgagttcagtttctttgctttccaggcgctgtaggcttccgaattgtcaaaaccgatatttaaagtaattccttccgtcctgccggcggaaacgatatttatctttccggtacgtttatacaccccgtccaataccgtacatgtctgatcttcattcatcggttttacacccatgtcgagccggtgggcaaaaccggttatccctgcattgttggcagtgacgggaaccgtgaccggtacggtttgtgatccccggtcgttcatgacgggggatttctcgtcgatctgtacggtaaagtcaccccctaagtccagataacctttgttcgtcttaatctttagcataatgattacttattttccgcgtgtaaaggtgtcgcgggcgttatctatggtttctttggccttctccaaatcctggtaaacgatataggcctttatcaatttgatagcctcacaggaggcgcgaagctcctttgctgcttccaggaactcccggtaggaagaatcacctgcaggggaagtgacgtaaccgccttcataatattcacccggattctgtggtaacgggttggcattggtacgctgccgcctgatcgcttcgatagtactaacggcgtcgatcactttaggattattcatttccggttgtggtaccacatattcccccttatgaactacgccggccacttcataacggccaccgggaccggtgtaaccgccttcataatacccgcttccggaagaaccggaaacaacacgttcagccgtggcggtcttgctgccggtggtattacttacagacatgtttttaatcttgtcccgttcagctttggccgctgcaagctgggcggcaccggtagccgcaagcattgccgcagcaatggctccggcaatcggtccgagatcggcggtcgccttcataatcgaaacggctgtatcggctatgatctgggaacacttgatagcaaagtttacatccgcatacttcttttgaatttccagtttcttattttccttctcttcttccagggcggcggtatcttccccgttgttttcggcttcctgtatgagaacatcgtattttgcttccacctggtcgatttcggcctgctgcatggcttccaccacggaagaagcaagaccggaataaaagtcaaagtattttttagcatgttgtattcccagttccagcctttttttctgatatgtcttttcgtcaatcagcccctggtcgtgcatattttccaacattgccagttcgtggtcgtactcctggctccaggatgtcccgatttccgcctgtatctggtaaagatcattctggtactggaaatccagctgttttatcgcctgttgtttcgccttctccagctccacagtagaaaggccggcggcctttgctatggcaatggcggcgtcgtatttggcttttactgcctttacctccttatcgtaccgttctttcatcccttcggtcccggatttgtcggatgtcagcaactccaccatttgcgcgatagccacccggtcacgcaataacttcatttcagactcacgcacggcgtcggccgcttccgtcgctgtttctatacgtttctgtttgccagtaatttccaaagtggcaatatcattctggtaagtacggtttatctccagaagttctgcggcgtgctccgcttcaacttccagcatataggcgtcggcggcttcctgcgtgatactccggtttaataccgctttttccatggtgtccttctggacgttgtaataggcggtttcgatctttaaccgttcgccccgtttctcctgtaccagttttatacgggcgtcctcctgcttgccggtttccgtaaaaatggccgtctgcgcttccgtttcgagcttgtggatttcatcgagtaacttcttcttttgggccggcgtttttgcttccagcttctggagggcgtcaatacgttcccggtaatagcgaaggttttccgccgtcccttcaagaatatactgggcttccgtcttattttccttttcccggttctctttgattagaagcatacgtttttcgtgctcgatctccagaggctttaatgtggcggccgtttccgtatttttgtactcccctgcttccactttctttttgaccttccccagttcgtttaaacgttttatttcggcgtcgatacgttctatttccttgtttttcttggcgatattcgcttcgctgtcttccgcccattgctcctgaacctttttcttttcggcctccagtttctttataagggatgtttcagtatttatattttctttattggtcccggttaatgaagtggccgtcgcctctgtttttaagatatcattattgatctgggcgattgctgattctataccggccaaatccttctgtgtcgtctgtagggctttcaactggttagcctctttttccgtaccaaataaacggcttattttagcggtaagactgttccggttatatcctgacaatgtattttgctggcgggtgtcccagtaagcgtcgctttgctctgattcctggctttcaagattcctttttttcttgtacaattcttccagttcctcctggtaagctttcaacttgatttgtttttccaaggaaactaaatattgatctatagcctccttgttgttgtttatgagcctgccttcttcattcaattccgcattataatccggtatcagttcttttaattcagcgagcctttgtttacgggtgtagttggaaaggttctcgtcattgatagcagctacaagagtttttatttttgcttcctggctggcatattcttcattcactttctttacgacttcctggtgggccttcatcgccgccgaagcctgttccgtcttctttgcaagctggtagatagcaacaccggctgccacgagtaacgcgagcagggccgtatatggattcttcaaaagttcgatcctcattaaccgaagggcggcggtacatcttttaatattcaggtgcagcaatgcctgggccgccgcataagccagagtagccgcccggctgatataaagctgtacggcgtgcgctttctctgcaacgaccgaagcaagggtcgccgttttaaaacgggcgtgccacatggtagcgattttcagtcctccatagtaggaaaccaaataagcggtaacggtataagtgacaacaccccatttattaaacatgtcgatcataccacccacaccttccaccataagcgtaacaaggtctattaaatcccggagaataccctttgattcatagaaacgtaaaactaccccttcaatagttgaacttagccggtttaatgcaccctgaacgttatcacccatttcttcggacatagcattaaaggcgtcttccgcacctgttaccgcatcgcaaagtgccagcacggtatcggtaccgttaaggaaagtgttaaacgctgcaacggaacgtttatcggtcagttcaagggccttgttcaagtctattccttcgctgtttagttttttaagtccctttaccagatcatccaggttgttaaccggaccgccaagagcaagcgcgagtttgccgctactgtcagccaggttaagcaaaatattacgtgttgccgtcgctgccgatgaagcgtcgaaaccgctgtttgccaaagctcccaaaagggcggtcgtttcctcgattgtgaatccgaaagaattagcaaccgggccgacggtagacattgcactattcaggtattcaaaattcagggccgaagacgttgtacctattgccatagtagaaagtgcccgttccgtatcttccgcatcaaggttgaaaatacgcaatgttgcaccggcaagcgtagcagccgaggcaagatcagtgtccacagccttagcgaatttcagcacggaaggcgtcatcgctttaatatcctctttaaaaaatcccagcttggcaagctctatctgaagttccgttacctgtgcggccgtataagaagtagtagcacccagccggcgcgcttcatctgttaaatccttgatactctttttcgtggttcccagaatagcggccaaagtactgtttttcttctcgaactctataatagtactgatcgcatcccttagcccgccgacaatctgtccggttatcattgcgccgatagtgacaaacacaccggccagaaccgtttttatcttattcagggaaagaagggaaccgccgaaaccttccgcctttttcgtggcctgcccgtatgctttctcaacttctttcagttccttctccagggcggcatatttttccggctgcaaggatttcaccgtatcgcgaagctctttccgcaaggcgtttgccttccttgccagctggttggcactcatggtggttttatccagccgtttctcacattcggcaatcttcttgttattctcgccgagcgtcttattattttctttcagttgctcatcaagccttttccactgtttaccaccagctttccctgtggcgattaaatcggtcatagccttttttatctccttattgctatcccggagctccttgttcttttctgaaagattatgtatttccttctgcgcatcggaggcgttcagggttaacacccattcgatatagtcaggttttaattttgccataagagtaaattttataaggcaaaattatcctggtgtaaagtggcggaaaaggacacaaaaaaagcccgtagaaccattctacaggcttattatactaagaagaaagtattttatctcttaaaggtaaaatccgaaggatcaaaacattctttatccttaattgttgcccgatctatcatccagcaaatgtaccaggttagaggaaccgatataagaggcgtcacgataaaggaaagaaaggcaaaagcaagccacccggataaagtagccggtttatgcttacatcctacgaaaaaaaatattaccaggaaaaagccgatcaaaaataaaatatcttcgtatgtcatacaatcatcgttagttctttaccgatatctttaatagtatttactattagggcctcccgttcttgtgagggcttttttattccacttatatattgagacataaggctttgacttattcccatacgtcgagccaccgcagaagcatttagttccgggtgagaaataaaaatccgatataagaaagtttcttccttcttatcttgaatagctaaacaatcattcatagggtctaaaaatatgcagctataccaatttcatataaaaactccggtgcaaggtcggcaccattggcccattcaatagtagcacgggttaaaccatattgaacaaatttttccttatccaataactccccgaaaacctcacctgtaagataaggttccaaatttacgatctttttactcccgtcgctgaaagtaacaagaagctcgtaattcctaatataatccacatctataacccgtaacataagcgtttattttaatggttcaattttatttattttttcccctttttgggccttttcccaaagagaaagtatttctgcctcgtgcaagttaatccactcatttacttttgcaataactttagctggagcctgaccgtctacaatccgatccaatacgctaatagaacattcataatcaccataagtaaaatgaatatgtggcggattatgatctttccaatagaggaatataataataccgaagaatctacaaatttcaggcataaactttgttttattggttactgaaacaaagataggtaataaaatcattacctacaaatatttaggtattaattttattacctattttagcgaactggcaaacatttcttttatcctttcccttacataatcctgatattcatatttaatcttcccgagtgtgtcatgatacagaatcccgtatatctgtcggttataaatctggtaattaccgtgtttcttcatatccaggaagcgggtatataatggaaggttagaatgtgcaattaccccctcgccgtccggaacgaccgaataattcgggttctgtagtgcggccattaatgcaccggatcgcccttggatgatctccccggttccctgtactttcttacgttcacggcctttctggtaaatccgtttggtagcgatatccaattgggcttgaaatatgtcctgtattccacgcccgatccggtcggtaaagaaatccgttttaaaattctcggccattcagttattcattttttgagaatccggaaataatgtgcctttccccggattcatccttaacagtttcatttttcttgtttgaggtatatttatatttccaataggtacatagcacatcatttacacctattgtaataatacctattatgacagttaaccagaaccacgcaaaagcatccattagaatcttgttttaaatgagaaagccaggctccaccctgcaaacgtcctgtaaaagccggattccggaagagtggaaaggctggttaaatccagttccttagtgacagggcaaccggtggcggaatcttctatcagcatttgtttgatacgctccataaccggctgcacctcttcgatagtctcataagcccctttacgttggggatcgtacttgctcataaggaaaataacgcataaattattttccctcacattgtcagccgaaaggctggcacccgctcccgacgggatcagaataaagagcaccggacattcttcttttgatagcccctgtatcgtcttactcatttcctcgtcaatggtaacgggtagcaccttctttatttcaggaatacgtttttgcacgccttcccagtattcacggtaaacctttatatctatcatatcgtcaatccctgataacgtttcgcctcccattcacggcgggtaacaagccccggaagaatcttaccgcccccgtatatccactttttaaactctgccggtatggatgaatcatacgcatccgctctgatcttcttataaagcgttgatttcttgaattttccgatacctacattaaagcaaaagcttactaccgcgtcaaactggtactgtcccaaatgaaggggaagcgcgtttacctggttttctaccgccctgatatccgattcaaagaaagcatcggcctgggcctcggtgataacatcacccggttttacgccgatcgtgtgaccgtaaccgatcgtacatactcccgcggcacatacatacgctttcaggcgtaacccctcgaatttcttgatcttgttttttgttcctgttgtcgttctcatttcttgttacgtttttggtgtaaatactcaaacttacatttatacagataaagcaatacatcccaaaagggtgtatcgtccacctccttcttatttccgaacacgccggaagccgccacctcaaagactatcccggtccagccggttttatcgtccgccttccggtcctcggatgccagcttctggaacaatatccgaaagtcgatagcttcaccaccgatataaaccggtccggaaagaaccatttcccaaacggcggaaaagaagtttaccgcatgaatggcaagcaaggaaggaacggccggcgtcttctccgggtccttgtaccggtaaagctttaacgtgatatcctggaagatttcatttatagccggatcgtctttttctgctgccgcctgtttgctttgctgcaacaaatccaggcaatcacaaaagttaccgaaagtaagaccgttcagcatgtcaccgacaccatgccagcccccgaaatcctgcatcaggttacgaccggttttcagaataggcgtaacgatccgctcgccctccttaccggttgtataagagaaaaagccgtccagcttttccagttgaccgtccagctctcggatgatctcacgccggtacatggtgtaatccgctttcatgcccagaaggaaagaaagccattttacgcggaactgtccggggctgatcgtaccgcggttcatcagtaccgacaatataagaaactgccggtactgctcactactgacttcatccaggcaggaagggacctccaccgtcttattattatatgtaaacttctccatgtccggacattaaaaggttattcctttggattgtacggtaacacccggtatatagtaatccaccgtttccgactgtgcgtccagctcacggatgatatcctgcaatacatccaggtaagccgccgcgtcctgctccaggctgttagcaaccgactgccgggcctctttttccgcccgcagtttatcccgtacggttgtgctctgctgcacctgtacgattccactgggcagaacttccaccggtaaacgttcaacggccttttttatggtaagaagtgcaagcgggcggcgtacatattccagcaatttctccgttaaaacggtatcgccttcaatcagtttattataacggttccgggtgataacaggtattatctgcccgtcctgaacttcccggatcataggaataagcaccaggaaaagccggtgacttccgatattgtaatattcatcgaacgtttccttattctgaataagaagccggtttatagcctttttcttaatgccgttcatccagaaatcaaatttttcgcggtccattagctccaccaacgcgtctacggcttcataagccaggttccggatattctcttcatccttgaactcctgtaaggcggtcatgcccgtttcattctctcccaaatgtttaccacgtccggccgttccgtgttgtgcgtccaaagtgggaatgacctttaaccaggtaaacatcgctaccgcctgctgcatcagccgcaaagtttccgccatgccgtccggttccgtaacgtccgcatgatcttcacggtaatacttatctaccgcgtctatgggctccgttccgatgatagcctgtaaatcccgaatacccagcggtaagataggttcccacttggtaaaatcaagatcattatcgatcaatcccaggacacggactatttcaccggccccgtcaccgcctttattaaataacttcgtcatttgctcggtctctttttaatgtatatggtttccaattatcaaaatcctttgtgaaattgtttatttcatcgtagaactccttataaaagcgggccagcccggtatctatcgttatacaggtttgctccgtgcgcggattggtgtttatattggccgagctttctattacaaaatcaaaagcgttaccaaaaccggccattactttagcatggttacggaaaatacagacacgtgatccgaaacgttccgccaccttctttaggtataaataaacatccgcgtaggaaccttgaaagatttcacctacataaaaatccgcgcgccctatgtcttttctctccagccatttctccacctccttgacatcggtaattgccatgcaccaggtagaaatcagaacatattccaacggttgttgcttcacgatcacacgaagataagtaaggctgtcaacgtccccatgactgatacagtgataagacgcccctttctcaaaatgccagggcaaacactcttccaggtgcagctccgattttactcgccggtcaaaatggacgtttttcgtccggcgtgcctttatatgcttgtccgggctatcattggcccggttctcttccggttgccggtcgcttaccggttcttccggcacatcttccggtttcggtgtgaaaaacagactacgcattttctttcatacggttagagggtgaaacgttctgttccgcttccactatggtacgataaagccctactttcgttgcggtacccggaaagttggcattaatatactgctgtaacggtttacaaaggatcatgtccggaatagccgtttcggaagcgttatacactttcaggctgtataatttttccgatccggaagaaagcttgttttctataatcaggtttgaaagtaccggatcaagaccgaagccggaagtggcggcagcgtccgccttattggatatcttaatctgggcgtccacataatcctttatcttcttatccagcggttccaccgtccagccctcaaagttattcgcttccggattccagaatttggtcgtgtgcatgtatttcccggcgttctgccttccggtaatattggaggcgaatttctccatagcttcgtccttgaaatcttccagcatctgggccgtgtatttctcgcccgtacgctcgcaaacctgttttatacgtgcttccgcgcggtcccagtaagactgcggcgattcgatatgcagggaaatggccgaagcgttttcattataggcgatcaggatagcggccagaccgccggcaagctccagccagtcaagcgcacccagaaaacgcggcgtactcatgaagtccttgcaaaaggaatagatattatagtatttcacggaaaccggatatttgaacgggtgggccggatcaaagaccgggtaacggtaagtataagccggatcaggataaggaaagtcgcccacaagtacttcctgcggttcatcctcgccgtcgggaggatataccaggcgggccttctgatagggaatatgttccagccgtaccaaacgcccgggattgcccacacgcggcgcacggttccggacaaactttataaaaaagccctgcatgtgtgttaagtctacgagtgagcggtgaagaaccgttgtgtaatcccacgactccaggtcggcggttatttccggatcgagtttccaacgccggtaaaaacggttattgtcttcgtcgattgcatcctcatacagccgcgggccttctccccactgcaaaccggctattttacccataatgccttcaccggcgtagaatttatccagtaaacgcatgacctcgcccggcatgtcgttattgtcacccatgggaacgataaaggtaccgtttacgctgatcttccgcgaaaagaaagccccccgccggtttaactggatgctggaaggttcccaacctttaccgcggccaccgatagaaaaggagatcaaacccttgtcggtgccggtatctataattccaaagttgccacttcgtcttatttccataatcttaaatcgttattcttttcccgttgaactccattaccagacattcccagcaattcagcggccggcctgttgtggtgtccgtcaggaatagtttatagcttgaattttcgatgctttcatccgtcgcctttttcctcaaacgggcagccgtgagtatcaccatgtcgccgccgtcccgtgtctgccggttccatttccggaacttgatagaaaaggttcccccggaaatggtaatccgcttcatctgttctaccgctacataaaggtttattttttccatagccggcggataaaacttttaatcctgccccagttatcatggaccaggcaaaaggatagaaagaaaaacatgaattttaggaacgtccataagctacacccgtttgtaaccttttctttttcctggctttgttgcttaacgtcggatttacgggtaacgactgtttccgcttgactggtagtttccttatgatcctggaaggaactgctttgattctttccagttcttttttcagtttttcggttgctgaaatcaatttctttaattcttccgaggctgtcgtagttgatacggatatgcgtactatcttcccggtaaacgtcaagtacgtgctcctcatggctcgaatctctccgcgcaagttcaataactccgtcagtagttgtttgtttttcttctccagttgcttctgtaaccgtttttcgtgtaacagagcgaggagaacgacaaccgtaaaaacaagctgcaaaacaaataaaaataagtaggtgtacgattccatgtctcatgtttattaagtcgttaattattattagtatcaaaagtgatagatttacggttcgggcaattcttcacgccgcaaagaaacggcttcatagtgtctattacacgggcgttctgcttgatagccttttccatttcgttacatttctgcaggacttccttgtacttgttatccacttcgtcaaaccgttttttctgttcctggtatgcgttctttagctccttacggtcattcttcatatcttctattagttcctggtaaacctcttgtactgacttcatggcatcagcttccgcttgtttacgggtatatcggagagtgaataaccaggtcaggccacccgtgcaaagagccgtaataatcgctgtaattatcgtttccgtcatattgatagagttgaaaattctacattatggtccggacgatacatacatgcgtcaaataacccgccacaatcccggccaggtccgccagaatatccttccagtcccatttattaccgggtgacattttatccccgtattccttacccaatgaagcacccagggcgaagggaacaccataattacccaacagggcacatatagcgtaattaattccgaaatgcttccatttgtcagttcctattttcataatttgaatcattggttatactgcaaaggtgggaagaacggaaaccgacgaaaaggacataaaaaagagtgccgggaaccaccccggcacaaacaaaccctaacctgggacttaaacccaacggctgccttttcagccggtatgctaaattgttaatattaaggattagacaacttttcgatgtcttttttcatcatacgtaataattgaatcctccttaacacctcatttgttggtgtactttcatctcctttctctattaggaaatcgattaggtcctcaataacttcgatgtaacaagcggaaaccggttccgtcttagtttgccactgtgtcaaaatctcggcactttcatctgttatatgtgcgccgtttacttctatatctttcataataattctttctttaaatgtttttaatcggtgtagtctctaaggtagtgaaatcaattattccggcctgccggtatatcccgagggcgactttcctaaaccgttcgtaattacgtctatcaatgggcgataactgccacctcttcatgtctttcatcaaatccggtatattattagcactattatacatacagttgtttttaccgtactcgtgatgaagtgatacagactgaaaatcaccggaaaaaacaaccaaccgtaaacgttcaagttcgaggaaagcaaactcattgttaaccttctccaccttgtatgctcttagttcaatggaaggcgcaccgtattcacgtctaacgaaaaataggatatcagaattatttgtattcatttggcacctccttttaagtcttctaatttaatatgtgaaatacttgttatactttccagtaccccgtcgcatatacttttaacccttaatccgcgggaaccgtcttttttgggtaaattcaggtgataatacgggcgattcctccagaatgtaatccggaaaatccagccacgaactttaaaagtagcattacttattttataatcaacctgtaccagatcacccggtttaaatttactttcttgtagaaacatcccctgtatttcttcctgttccttctttatttcctcaattcttttatcattgttttgtaattgggtaagtaacacttgctgatattcagtatatatcattcggcacctcctttcttttctatctggggacgctctgaaaacctatatattcttttaacccggtaaataaaaaaataggctacaggcttgtcacagccgttattatgtgttttagtgtcctgatctatgtgaataaatccgatgccggaagatattttcaacggcattgttttagggtatttctcgttcagctcctttacctttgcttccagttcagttttaaaagcatcgaaggaaatttcgtcagggcaaagcgtattaccaaactggtttgcaaactctgccatttcagcacattttcgattctgtggcttatactcgttaagctctataaaataggatgtcattttcggcctcctttctgtaccttctttgcccggtacacacaaacaactgcaccgataacagccggcggaaagataaaggttagacagaaccaggcaatagcagataaataataagcatcggaagccgagtttacggaacaatctttttccaattcctgaaaataacgatgttggatcgtgtttacgtccgtgctaccagtacggaacgaaggcacgtagcttgtgccggattgaaattcttttttcataatgatagtgattttgactattaaaaaagagaaaggcggctaccatttcccctaattcgtcaaaatcactaccgcaaaccgtccgatgaacgggttaaaagtaatagggaaaggcaaccgccttatatatctaaaatagataaataccgagcataaaaaaagcccgttgtttattcgagccaataaccgagactcaccggaccgcaccagcggtagcaattttgacaggggcaaatgtcggtattaaaatctgaacaaaaaaaaaaaaacgttaataaaagtttataagaaaaagaaaatttgtcgactctataattcgttacttcgtaacaaaaacgcccgccagaattggcgagcgttaatctattcttatggttcatatctcttttgagtttcaccctcttcatcactttcctttttcatatttcgcataaataaaggaactttcttttcaacctcttcatttttattctctttatcttccatggccgctttctccatgtcttcaaaatctttttgtgttataattccttctcgtatttcatcatcagaaactatatctttacttaataaccaatgatatacattttgattcgtgctctcatttgtaacaacatacgcctgctcaaatttccaccgaaattttgctaaataattcatggcgtctaccatagaattaaattcaattttcttcccggattcatctaccataaacgttttgtattttccgaaataagatgttttttgcccgaagtctatttgtattttgactttagaacttaagactttccctgtaccaacaatttcacaaaacgtttttcgagtttcttgtgctgtagctgctactactaaaatagccaacacggtaattaataataatttcttcatatcagtaacttaaaattagtgtatactttcgtctgtaccacccgtaagttctgacggttatatgcagtgtaattttgacggctgcaaaaatacttaatatgtacaattataaagaatattatccccaaaaatgaaaggcaaccgcccaaaaatacacggtaattcatgaaaaacgccccaaaaaatgaagcaaaaacgcataaaaaacacgctttttcgcgtaaaattttggtctaaatgcagataaacgactgaaaaacaatcaaaaaccggagaaaatttcaaaaactaaaaaaatagcaccttccgaagaccgagccgctcagaagtcggaaagcagttgccctccccctaaaaggtgaaatatgacctctcccggaggggtacccgtaacctggtaacacaaaaaacgccggaaaaccgattttccagcgttacaaggcaattaccttttatgcctgttctctatccattgatccacaaacgagtcggcctgcagcgtccgcttgcctcgtactaaagctatccagccggggcgcatcagtaagtatttgaaagcgtcggagaaattggtggataacatcggtagttttttcggtgccagcttttcggacttcttcactttgaacactaccttagagttaccccggtatttgatttcagcctttgccttttctacggaactaaccatttctttacagttcatcgcatcaaccagcaagataggcaggttcttgttggtaccgcccataatctcctgcataaagtcgtattccgtatcctgccggataactgcctgtttgcggctctttaggtttacgatccagccggtacggtttccgctaccgtctttttctatggcgtctttgatcttacccgcgtaatcctccttctgtttctcaaagttattacctgcacggtcatagtacaaatccagttctttatattcgtggttctggaagaaagtgaggaactggtcggcgatctcccggaaccagcccggcggtatctcaaaaaagttcttatgtacccggtaataagcaccgtccggctgaccgatcaccaaagaaagcatattaccgaagtccataccaccttcaatcgctttatcatggtgcaggtaccggagctcccgcgagctgtaagcggcttctccggacatggtaccgttataatacttatgtccttcaccaaacaacacatagaaacgtaaatccctgcgaagaccgggacgcatacccaccaccgactttttaaattcgtgaagctccagcgtaccattatacaaccgctttaaataatcaatcgtaagtatctcaacattagcgaatgaagaagcgttaagaaagaacgtttgtccttttctcaacttcaacaaagcccggtcgtaatattcaatatcccgtttcaaacgtttcagtttcaaaggggaaggcttattttttctttcttcttttaatagagaaattaccaggtcattacgcatacttgccgcctgtactattttaatgatccgttccgggtccatttgcttgacataccggaaaaaccagtcgtactcgttttcgtcgatatccggcatatcggtagtaatggttatccccaggaataaatgggaatgtccgtaagtgatcgcatcaccgcgaagaataggcatagcgcggtttactttcatttccttgtcgtacttcgcttcatcataaaacagatgtattacagactttccggcaagcagtgaagggttatccagtgatcccatgaaaataacacatccgttccagaagctgtaaacatgcttgtaatcatccacgataaccgaacatttacgccgccaggattcaggcgggcgggtatcttttacatagtgtaccccttcgatcaggcccataagctgccagcccttctgaacggccggcattatattatcttccaggttactgtaggtattggcaacaaaagcgaacgcaccgccgggcatttcttccacacaacgggcggaacgcctggcttgtataacggtcgatttggccataccgcgcccgtcaacagatacaaggatagtagtatcgatccagtccgtcagaacctggattatatggccgtatttgatttccacatcatcggcgttactcaccttcgttatcttccccgaactctttgatatcatacaacatacgttttttcaggtcaaaagctttaatacgcgcgtcctcttttatattatcacgtacaataacaggaatttccgggatcgcgtcgataaactcttccagttccttacggtcgatttcaggaacacccagatccttacggctggtagtataaataaccgtgcttttctgtgaaagcagttcctccggtatttcggcctgttgatccttataacatccgcgaagttccgccgccagtttcagcaggttcttagcctccttcacatttcccataagaaagacggtattcgcccagttttcggccttttccgcatacaagttagcgaaagcctgcgggcgtacgttatcctgcgtataaaagaaattgagactgtcagcgtacacctggcgggccatccagtccgaaaggccgtaaggttccgacttcaaaaggcggatgatgccggcctttgtcaccagcttaccatttatacgcatacgggcacgaaggccccgtaccatttccataaggctgtaatattccctttcatcgggcgcgagggcttccagcgtaccggtagaaagaatcctttgaatctggttgatatccaccttgtcaaagtctattcgtgagggcttaattaaattcgtcgtcatccatttgttcgattaaacgttcgaaagtatgtcttttccgtacggcctccagctgttttatagcttccacgtttccgtcttccgccgcttcatggagttttatttcaggcgcggcacgtgctaccagaatcccttcccggatcaggaagttaacggaagttcctaccgtttccgcatcccggacaaaaagcccggcatcctccaaagaaatccccagggaaacggctatgtctttcggcgaataccctaaagaagacaaacgccgtacatcctccttttgctgcgcatccaggtaaatactatccaccaccgttaaatcgttcatacgcatcttttattcgtttctgtgccgtgaaataataaatttcgtcctgttccattaatacaaagttccggccgctttcaatggctgccacggccgtagtaccggaaccgccgaaagtgtccaggatcagatcgccgggctttgtactgtcttcaatcagtttacggatcaacgccaccggtttctgtgtgggatgaaccttttcaccttctaccagtttcgcaccggaagcaaaagaccggatattatctattatgtttgtggcaccgatagaaacaccctttccgcaatgaaacaaaataagctcatgtataaaggcgtaatgattacccgggcccgaccgtttgttccagacgatcatgtttgacgcacctaaatacaagtcaaacaacggataataaaaagcatacccgcgccagtccgtaaaaaagtacacacaagcaccgggtttcttcacccggttaaactccaggaacaaatcccggtaaaagggtttacagatagacaaatctttaaaactgcctttctgcccgttgtgtgtcattcccaggaaataaggcggatcggttattatacaatctacggaattgtccggaacacgtttcaacgcctccaggcaatcctcgttatatatttggtttgtaatcattggaaagttgtttaagccggctttcttctttttctatccggagggttaatgtcttgagctggtgccccagctccgagcggtcgcaagggtgagagaaacggcccaggttctttgtgatccgttgccgtttccctgtcagactggcaataagttcaattactttttttttcgcgcctcaatttcttcctctatggccttctgtgtagtttcccacttttggatcaatgcaagggcactcgctttcttcttctcatcatccccggcctgttccagtttcgccttattctttgaaaggttggcgcgggcgttattcagtgccttttgtatgtcgatatccgaaaggttctcgacgcccttacggacggacaaactttttaccttctcacatttacccagaatctttccgttctcccggtaatattccagttcatcccacatctcgcggttagcgatgaagttttccacaaccgcctgcgcttcctgtgctgtagaaagtgaactgacatcatccggcgtagcttccaggcgggcgaaagcttccttatacttcccgtatgcggtgaacatgtcggaaacaagtattttcagaatgtcgggacaatccggagaattcaggaaggtaaatttctcgcggaaacgtatcattttggttacggtttccggggctgctttgtatcgtttctccgcctcttccagttcctcttccagctcttccacacggtcggcattttcatccatggaaagaaccttatcccggaaatcggacgaaacgagttcttccacactgacgccgaaagattcggcaagttccagcagcaaatcatcgctgtattttaccggcgttttggatgtttcctcccgggcgggttccatttttaccgcggtcagctgtttggagtttcgccggatcgtcttaaattcacgttcagaaagcccggccaacttccgtagttcctctaaaagaatggccttcatcgtttccgtttctccctgccggcggaatgacttctttaacatacggttgataccgtatttctcgtacagttccacgccctgaataaagttacgcggaccggccagataggtaataatttcctgtttcatactatataaaatttgatgatacaaaggaaaaaaggggcaattaccctaaaaaggacaaagggtggccgggcatgtgctgccggtcaccctttgaattacatgaaagccgtttacttacgcctcataacggctttgttcaatccatttcatagcctccgaaccgtcgttaaacgcccgcaacgtcagttgggaaccttcggaagcggtaaacgtcttaccacctttcagaaggaaattaccgcccgcttccaccgtaggcgcaacacccgaacatcccataagggtaattaccgagccgtgacttccaccggtaacaccggctatcttagccgcacccgcggaaagctggtactgcccgtccgtctggtaatctatatccgtggctccggcttccaccacggccaccggttcttccagagtgtcggtaccccggtaaatggcgatatcatcccctttgctgatctgggtgaaagtaagttcgttcgtattcgattcattggaaccggtataagaaacggataacttacacgggttacagggcgttccgatcagatcggcaggctttccgctacaataacggagcacaacgatacatttcttggacagccagtttgtcttaaactcgcgaatttcctgttcgttaccgggatgattgaacttaacggaaggcgtataaccttcggcgtccgtttccccgtcactgttggaactgatttcagcggtaccgggtgtcaggtaaataccgatcgcgtaacgtcccgccttcattacgatatcatcctcgataaccacgccggcatcgtttctctgcgggaaggaaagaatatcgtcaacgtcgtaaattacgagctgatccttgggctgaataccgttaccgggattgccggccggccttcttacgcttgcttttacgtatgtcataacttaatgatttataaggttataaaatggaagggataaagtatcccttccgccaaaaattagcctcttgccacttcgtagaatttaccgtcggcggctttcgccagcttgataaacttgccttcggaaagcgtcatagcttcggttaagacaaagtttccgccggctgcaatggtggaagcaaattcagaaccgcttccgtagatcgtgtaaacgacaccggcttccgcatcggtaaagttagtgattgccgttgcctttgtattctcaccggttacgaatacttcaccgtcaagcaaagaaggatccgtttcatccggcgcaaactgcaacgcatcggaagaagcgttttcgcggccgatctcgataaatttaccgtcggcacgtttcatcagtttgataacatcccccttacccggctgccaggtagcggaaataaggtcaaattttccgcttttctcaatcttaacgcctttatccacgcttccgcatttcagggaaataaccgtacctaccggcgcgtcttcaatatcggtaatcgtaaattcggctgtgttcgctacggtaacaatggaggtatgaagcttggccgacgggttcttgtccttgtcagcgtccacaaagtaagacgccgggcggtcatactcattacagaagatcatctggcgcgtatagtccatatcttctttcttggtgtacttgaagcccacggcaatagcccagatactttcacgccagttactccatactttcaggctccagtcttcctgctccaggttgaaagccgtcatttcgcctggtttgtcctcgtaggttttaatgttgccttcaaacgtccagaaaatacggtggtggttgtcagcattgggaaccgggataatctttaccgccggatattccttcacatacatgatattagccttgtaatcctggttctgtccgtaatgcagttcattgtatttatgatacaatacaataaagtgcgaaggcatataaagtgccaggttaccgctgtcacgaagaaccgccgggatcatggaagtacccttgtacaccttttcaccgatgtttgcttcggtaagttctcccagctcgaacggtttaatctggtaaacgaactttccgttattgatatcggtatgtccgttcactttcttgttcaggaactcatacaggccgtcagctgcagcaagtgctttgcccggttcgttcagattcgggtccttacggattccgttaatacggcgttgttcacgctcgttatgcaacttcttggcggtttcggccaggatgtactcgataaaagaccacttgatagggtttgaaccttccttgttcaaagtgccgatccaggttttctccagggcctttaaatttttgaaacggtgtgcaaacatcacgttgaacatgcgcagggtttcatcgtcgaactcgtaggaacctttagtcaccttgtcgaagtcggattcctcattgccggcctgtgagaactcgcccagccagatattaaccagcgtagccaaatcctgataaccggattcaagcgggaaaatactttcaatggaaggaagttccattaaaaacgactgcaaacgctgttgccagggaatacgataaaaagccccgaggtcttccttcaaacggctgtagtcaagggaactggctttcggaagagcgatcatttcaaaaccggcagcctccattaacgcagctttggcgcgaaggttatacgggcggtccagtgagaacatttcaccctgcaagcctcccagctgcttttcgtcccggagattgaaagcccctttaccgtccgcctgggcgttgtgctgcttccctttgcccggatcatcttccgcggcggctgaaagttgggcgataataccggaaagcttcgttatctcggcatccttcttggcaatcagcgcggtgttgttccggttttcgtcacgctgttgcgtctgcaaggcttcaagctgttcctgcgcctgtaccagacgggcggcagtatcacccaacaaaccgcgaaggaaagcggtagtggtaggttcttcggttccctctccctggtttccgtcttcggcttcgtcctggaaatcgttttcgagggacgctttaaagtccgtgaggaatttttcaggaaaaccgtagtttttcagttttgccatttcctcggccgtgatagagttcttatcctctaccttgctccattccgacaggcccaacaagcccagcatgtgagcggataagctcttaaaatccaatttcatatatacaaaattttaaagttaatactatatgttatacatctcgtttacttttctgacggtgacctgtgccagtacccactttaccgcgtcttccagcgtaccgaactggtcgatatagccgtttgccacggctacgtcaccggtgaatatctgtccccggaaaaggggaagttccggatcataggcaatacccagattccgactgatcgcatcgcagaaaatacggtgcatgacggccagacgctgctttataggctcttcgttgttctccttttcaatcgcgcgggtttcatagtttttcagatcggcactatccggatagatttcccggtaatcaatgccctgtttcctgaaatattccttaaaggattggtaagtaagcatgataccgacggaaccgacttcacacataggggaagcgataaaggttctaccggcggcggtgcccagccagaaatgggcactacccatggtaccggccacgtaggtggctataggtttggaagattcggcaatcattttagccgccaggtccacatgtgcggccataccgcctggaccgttgatccacaggaccgcgccgcaaatcttaggattatcggaaatatcacggagctgcttttccaggcggtaagtctcccaggaatacaaggtgccttccaggataatgacggccacactgtcagccggcagggtgtcatcatccagttcccaccggttggcaaggtaaggcgtagtagcgtaggcggttattttattattgtcgagccgtttttcgatcgcatccaggttgccggctgcaacacacggcacaagtaaggaaagcaaccggtaataatcattatcagcgattgcccaaggtgctgtaaaaatctcctgtattttgtccacgttctcttttttacggcaaagaaaacgcctatataataggtagagaaggactgaaaggaacctacaggaacgcatcaacgcccggacccgtaccggacagggtgcagttatacaggcccccgccgatctcaaaagaaaaggtaagcgggtaatcgggagaaccggaaacacgggtgttacccgtttcgtcagtatagagggcgacaaagggcgtcgctttcagattttccaggtaaagcgtcttattttgcgacacgtcggcaagcttgaaggtatgttttttagtatagacgtcttcatttttgctgtcacccggttttaaggttcccggtacgatcataagaatatcaggttttccgatagagcggataacgactttcgagagcacgacgccaaaatggataatgttgtaaacgggaaccagttgcaggctatgggcggcggatattaactttcttgacataattacagatataaagtattgataatcaaacattcagcatttttcggacgtttttcagccaaaaaccggacaaaaaaggacaaacagatacagttggtaggtaaaaaataacttgcttttttacactttttttcggttatacgcccttttcttcttacgcctgaaactgtcccgccaccgctggtagtttttcagcagcccgtcttcctgaatggaagagatatcatactttttcaggaaggtaaaaacggtttccttaaactcgattccgtgcaggtgcttgttttcgtccatgagttcgtgcagctcggcccacatcagggcacgcagacgcttttcaagaatggcggtaccgcgtacggaaatgtaattgaactgttccggagacttgccgccggcaaaattggcctcccggcggtcaggcagcataaactccaggttgccgcggtcagccggacaatttaccggccgtttctccatgagatcgtaaacggtcacatagatatcggacgaggaaggaaaacggacggtaccgaccgtttcgtcgtaatatttgccccggacatactcggccaggtaggattcgatctgtattcgggtggtaatcatagcaataacattcctttttaaaggcaaagatattcctttatcggctgttggtctgccatttacgggaaaatgtaggctttcagtcgtcattttgataaatatactccgggagaataattataatatgccttttccagccgccacacacccgacattttctctgccaggctgtgctaatataatccggtactaaatttttgtaatttcgtaaccgggcaaccgacaaaggtaaaatcctgtatcttagcaacttagtaacgttactaatttccgttacaaaaaaatggccggaaaacagtttgtaaccgggcttaccggtagaagataaaaaggccggtgttacaaaccggaaaaattcgtaaccgttttgtaactgcaacttcgtaacctttatttcctatttatttatttgattttcagacttttttctttcaagcaaacaaaggttacaaggttactaaaattttgtatgaaatagaggtggggtatggggagggaagccgggcgggacgcatttgtttccatacgaaaagagggaccgacacattcgtatctggtccctcttttcgtattttataccggctccgatccgtcttatacgcgatgtttgcacctgcttaaaatccatttctttacgtccgggggtatatagcggtgcacgacggccgtatagtcctcgttaaattcatactccaggtagttgtcgccttccaggataaaaacacaggccgttttgatgatccattcgagctgctcgcccgaatagcgttccagtgccaggacggtaccgggtttcatacgctccagatagcggtagacctgttcggcgaatttccggaacctctcgccgctgttccagagcgcggtaaactcggacatgctgtttaatttcaaatgcgcgttattcattcatccggtcgttcatcaggtacaaacatgagtgtcggatcggccggttccgttccaccaccggcagccgtttccgccgtgccgcatgaacgcagatagatcatgtcggcggccttgccgtcgttatccttgcgtacgatacgcccctgggagttgcaaaggtccttcgggttgagttcgtcaatgtaggggcaaagggccacaaaacctttgagggcctttgtaaaacgctgcatcgtgattttattcacaccggaaaagcttttgtaatcggcgaaggccttttcacggacgataaaacagtccaggtgctcgctgtccggagagaaataagagttcgcccagtcctcaaagttattgcccatatcggccttgtatttacgcctgataatgttttccatgggcggaagcaattttatagattcctcgcaaagggaaaggtaaaaacggcagcactgcaagaagaaatttatatcggcgttccactcgttctcgctgtaagtcttggaaaacaaatccttaccgaaatcgtcccggatagaacgcgtttcccggtagtcgttatcttccgtacgctggtggtagtagtcggagaataccaggtacagcaaacgggcttccgtagacggatcaaaatcaataggaacgtaattagttgtaaatcccagcttggccgattcctcgaaaggtatagtaaacgactggttgttcttcgggttcacggtcatatctgacgtgatgatgtcgtaaaacaggcccgtattaagataccggtcgcaatcatccaccagaataaagtcggtatgctggttcacctggtcgaacacatgcggattatccattaacttgggattacggccggaaagcttgacgctcttcataaagtaggaaagggccttgaacatgaatgatttgcccgaacgtccgttacattcaccgtcttcaccgatcttgttatccatggcctgtggtgcccaggcacgcgaaggggatttgtaccgatgcagcatataaccgatagtaaatatcttattgataaggtttcttttctgttcggcaacttcttccgccgtgaggccttccccctcgatatcgaatttatgtttttcccggtaggattccgcttcccccacgctcttgtcgtcgaaattgtattccagttccttacgccagtaaacgcggctcgaattgattacatagccgaaaaagttagacggtacggcatttatccggatatcaaacacatcgttgccctctatgtcttttttacgggaaatggtaaacatgtcttccataagacggactttgtgtttcagtacgttttcttcccaaacgtagtgggacaatgtgctgccgttggccggatgttcctttataccggtaccgcttacctccatgctgcaaccgggaaagaagaacatctgcgtattatgggtataattggtaaagtccagttctatttcctgcaaattgtccagggccgtatctgacagtttggggctgttcagaataagattccttatatcgcgggataaaaagttctcttgggcccactcacggataaacttccggatatcctttgcctttatcagttttacaatattgccggtaatacggatgtatttcgttgaactggaattttcatcatgaagcgaatagaaaccgttaagacgtaaaaagtagtgaaggcagtccgcgtctatattgtgatcccattgccgggatttctcgttaaacttggaataccagaatttggcgggcatggcaagcgtcataaggttacggaaatcctcgttcttgcttcgtaattccataaagtcccggaagtccttacggggtttgccccgctgatcccggtaagtggtaagccaggccggtagccagatcgtgtggatatcgataaaacatagtgcaagttccgtaccctttaccctgcccgtcgtgtcgatatcgggtatgttatacaggacttcaacgtatttcatgatctccttgtagtcctgttcggaaagtttatatgtttccgaattaaaccagatcggggaaaagcccagcgatttaacgcacagggcgtcgcgctctccggaacatataaacgcctcctgcagcttctgttccttataaggcttttccgcattggccggattctttttaaaggcggcttcttccctggaattaaactcccggtataaggctttcagttcggaaagaccgtttatatagtccttcggcttgacaccttccggggtgtaggaaaaacgccactgcttgtccggattcagaggctcgtatattttatagaacttcacttcgggcgtgtcgccttcggccggttttaccagacattcgcgcataaagatagggtatgtcgcagtcgcgtatttataggttacctcgcgattttttacataccctatatatttggccgaataccagtgcagagcctcggcgttctcctgggtgacacgggggccgagtatgcgtaactgatccggggtgagatgatcggcaagctcgaaaattttagtaccgtctttctgatcctgggaggccggaaccttacggatatccggcttgtttacgttacggttgagttcatcggttacgttgtacatggatgcaagtttaaggatcgcctcgttaaaccggaggccttcctcatacatgcagatatcgacagggctttgagccgttccggtatcgccgaaatccgttaccttataaacctgctgggaaccttcctttccgaatagcttgatacaggccgacgcgtcgtcttctgacggccggcgtttgaaatggcggttggttccgacacaatcccgggcttgcggataataatgtagaataatatccagcccgttgttggttactttgtagatgtcttctgcctttatcatcgttataaagttacatagttacttatttttcgttgttttcctcctgctttgttttcaagtctccccaaggttgatacaggaaaacgaataataacagccaaagaaaagcggttttacccgtataataaatgacaaaggcaatcagtcccataaaggcaaccacgataatagcgtgggcgatgtattttaaatttttatctttcattgttcaaacatgttatactgaattgaaaaaccgaatttgcttaatctcctttcctggagaagggaacgtttgtcatgtgaaggcataatgaccaccaggttctttgtatcgaactggtaacctttcttccgcatctgataacgtaggtttcttaggcgtctgtcttctttcatggcatttcgttaagatcgtcttagtttatagaaggcatggcacactatcacaaaggatagcgtttaaatcctcctgtatggtttcctgttgcttcttgttcaggtgtaccaggaaataaccttttccgtcggaaagattctttatttccgccagattatacttccggtccattgcatccacgaatgcaggggattccatggggcggaagctactgaatattttataggttccactactgccttctattcgtaacgtggttaattcatcgggggtggtaattgttgatttcattgctgtattatttttagaaaagtccacataaagtgtaaaaaactgatttatatttatcgctctttcttcttttgtattagaaagatacacccttttatttttcttatccatttttatttaatctcttgcatcagccatttttcggcctttagccgttgccgaatagatattcggtttatcacctttgaaacatttagtctttatccattcatatctttcagcttcccggagataaaataatattccgtattcagatgtatttttcaaccaatctaatttcttgatttgctcaaatgtcataggaccgccatatacaagcgatgatgttaacatctgaactctttctttcaatgaatattcactcatatttaatttgttttactctaattgattcttacatacttgccacttatgttacaagtttttagtatctctgcgttttcttctccaaaagcgatcaaaacagcaccacaaccaggcgaatccccccgtattccgtccggcctgaaaaaacgaatccttccgcgtagaaatttaattgccgttgccttctcaaatataatatcctggaacatcttactatcacagcggttgaacaacagcgcaatgccattgccgtgttgtgccagtttacgaacaaattgttcaataagcggacgggaataaggtggatttaaccagacacgacctacccaatctttagttaatccgtcatggtttttgttgtacatggtttctgccgtttgccaaagcggtttaaccggagcacatggatctaaatcaaactttcctaatgcgtctataatttctttgggtgtataccactcatcagtggtattagccgatttttcaaaggttgtattcatatctatcatgttatgaggggttatacaattcatatccattatcccaaagactatcactgcgaaaattgaagaaatcttccaaagagatacgtacaccatcttctaaaagaagaaatccgttttcaatagtcatccattcgtcagaggaaaagaaacggtgcgtaaccttcttaccctctttcattgcttgtatagcttcttctttgctcattatcttttcttgatttgaattatttttcaccacttatttttaattttaccaattcaccaataggataggtcgtatgtttcggtctgtttattttcactttatgagaagaaagaaacaacggaacaggttctattcgatagaaagtgtagtaagcttctttaggagctgttttttcatattcctttaaatattcttctgctttatttctcgtatcaaatgcggcaaggatagaaaaccaaacgccgtcttcttcgtatattccggattcccttttagttactatgtaaattttgctcattgttgtttatagctgtgccggaggatagcatcgaactaccaataacacccgctttcgcccttcggggttatctccacactccggcggttattatatggagcggcaaaagccgccccggttatttattcacttttcttttccggaagaaaaacaaagtctgcccaaatatcaaggaattgtcgaccgcaatatgctgccagttccgacgttttgaaggcaagccgaacgccgatgtacgcactcgcgtacgatgaatcgtcagccgcgctcgcagacgaaacaccgcctaacgcggccgcgttgtagtacgaccgatacaccacacgagacttttcttcctcgtccaacttattgtattcttcccctgtataaagaataaaccaaggataataacggcattcatcctctgtaaatcgaggttcccagccttcatttaaagctttgacaatgatacggagtttcagaaaagccaaaacgtcaggttcaagaccgagggatattttatctcggttccatgcttctgcatcgatgccaatttcatggcaggcgtcctcaaacgtcttaatacgttttcttacgtctttttctggttcatcaataagggttaagattccatttctccagacagctgttttaccttccggaatttcgatttctaatttctttgatttcattcttcttttatttattggttttcactatggaagatttttacgcctgttacttcctcgatcttatcctttgcaagttcgggaatacgacaacgactacctcgccaattacgaaaggtatgtaatggcactttacatgcttctgccaatttaagggacatttcagaagattcttttaccggcaaattcaaaaggtacattcttagtttctcgccgtcatcattcctttttaatttttttttcgtcatacctttgtgataaatatactcattattgttaactttacatagcaaaggtataattatttttaccacaggtgaataaaattcacgttaataaaagttataacaaaggtgtaatatggctaattttttgttaataagagagttatgtgaattaaagaaaatcactatacgagaacttgcttcacgtataggaaaagaagatagtagcatacaggctattgttagaaatggatcaacgaacacaaaaaccattgaggcaatagcaaaggttttagaggttcctgtaggtgtattctttgatgatattcccataactggaataaaatcaaatgaacttgataaagatgcaaaaatagctgatttagaaaggataattgaggagaaggaacgtctaatacaagtcttattaagtaagaaataacctgtaatagataagaaatgtaggcatattgtaggccatacgtttatacaaatgattaataatcaggcgattaaagaacgttacttgaatcactgatgtaaacgttgattatttaataatagtcaacgtttttcttttgtttggggtacatcaattttattgaattctgagtggtttcatattgcgattatcccctataaagcagtaaatgtccccctatgtccccctttactgtatattatattgatttgataaacaggcaaatatttgatttaattaagaatatatttataccccctattttataaagcaactctcattattattcctacatttgcattcagagattcgtctctttagttgggaaacataaaccttttgttcatgaagcatttacgacaaactttactttttatattattagggttcttattgagtgcttgtcgtcatacagccgaccgattgttatctatcgaacaattaatcaggctgaaaccggacagcgccctttctttgcttcgccaaattcagtatccggagaggctgtcggattcaaatggcgctttatatgcgctgctaatgacgcaagtgattaatcagtcatctgatgaggggcataaaagtgattcacttatatctgttgcaatcgattattataaaggtacgaaggactctgctcatgcggcactggcttattataatgccggtctggtagcaatggataatgaagattcggaagcttccctgcataatttcctaaagacaatcgattggttgggagagagtgataacgatgaacttcagttcatggtcaggtataaaatgagtcgtcttttcaacttgcgactgattcctgacgaggaactacggttggggaaggcagcgttaccttatgccgaacggattggtaatcctttgtatatctgtgcactgttgccatatatcactcacggatttatgcagacaaatcaactggatagcgcctataaatattctgtgcaagcgatacagctggctgagaaagagaatctggtccggacattatcacatatttattcacagcatgcccatctttgcatggcaatgaaggactataaacaggcgttgatgtatcgcgataaagatttggctattctatttgaacttttcggagaggaaaatgaatatatctatgatcattatataaataaggcaaacacactgactgaactgcatcagtatgattctgctttctactacattaataaagcggtggaagatacaacagatatacaatatacaactcgaaagtctttggctaaggctgaaatttatgctgctaccgggcagatggattcggcatattattatatgaaccgacatgctgacttgcgggataggctcatagaggagagagataaggaaggtttactgactttgcaccggaattatcacaatgatgaattgaaaaaagccaatacccgtctttggcaacaggcggtagaaaggaagctgcaactgtacgttgtgactattgtttgttgcctggcgattttgttaggggtatgcatctacttctttttatataaaaggaaacaacaggaagtattgcgtcagaaaggacagattgcccatcagcaggagttgttgaagtaccgtgaaatagaaaaactacaggcagaaaaagacttgtcggaagctaaggaaagggaagcgcagattcgggagaaagaggctttactaaaggttgagttctttaagcgcctgaatgaaacttgtattcctgtgattgaaaatccaaagacccagcagaatataatgctcaagaatgaggactggaaagttatattcaagaatgccaacagtatcttcctgaattttacagaacgtctgaagaatcagtatcctgcactgaatgaggaggatttgcggtattgctgtatggtgaaaatgcagttttcgcagactgatattgctaagatcatgcatctggagaaagattcggtgaagaaaagactgaaaagaattcgtaccgaaaagatggggatagcgcaggaaacgacattggaggctgtgcttcgggacttttaaatggttaagaatgagaatgaaataatttgttaaaccaaacattagaattatgaaacaaacactgagttttcatagtccgatcattgcttctacacagagcaaggtggatgtagaagcttttgagaagagtacagatgcctttgaaaagggagagcgcttacagtctttttatctgttgctggattatattgatccggagttacgcagcaaatttggtaatgcagaagggacagagtttgccgtacctcatggttccattatggtctatctgaggctggagggtgaccagctgaatattacagctccatttctgttgttgccggaaaaggggaggattcctttgctgcgccaggtggcagctttgaatctgacagaactgacgttagcatgtatctctttgcagaatgataagttgttctttgactttcattgtccggtggctttatgcaatccttacaagatatactatgtgcttgaggaaatctgccggataggagataagtatgatgacgaatttgtgactaagttcaaggccgagcgcatttatgagcccaaaattactccatacgacaatgaaacggtggataaggtatacgaagccctccagcagagctgtaaggaatgtatggacgctgtaaaatacttcgagacagaacgaaaatatggttatgcctggaatatattatccagtacgcttcttaaaatatgctattttgtctgtccgcaagggcaactgctgaatgatcttgataaagcgattacagatcatgggcgggaggatatgccgttgccggagatcgtatcccgtaccaaatctgttgtcacacgccttcaggaaatgacgaaggagcaactggctgccgatctttactttgttgaaactttcatttcggacagacgccgttccgtactgaaaaacattcaggataactttgaagatacatacgagaaagccggctcggcattggaatcaggtgacttcatcgtttgctgcctgcttattattaataaattctatgaattgtactattataataatgtgcagaatgatgtgaatgcggtagttgtgaaagcaatgaaggctacctctgccatgtcatgggaagaagctgctccgatattatatgaagcgatggataatatcatggaaggagaactggatgtagatgatgacgaagaaggtggtgacgaagacggagaaacaatgggcttcgatacgtcacagcttcaacagatgcaacaggaaatgatgcagcaggcgatgcagaatattgatatggagcaaatacagaagatgcagcaacttgctatggagaatatgcaaaagatgatggccggtatgtatggcaacaataacaatacggaagaggacactaacaaataaagaacaagactatggaacagaatatatacaatgccatttataaagtgaatcatgccggtggctgcggcagttgtttttatctgaaacaatatgatctgtttgttaccaattatcatgtagtagagggattccgtcaggtagcgatccaggataatgataagaattcgtttctggccagggtcgttatggtaaattccgtattggatattgctttgctgtcggtggaaggggatttttctgctcttccggatatccggttatcggagttgaaagaagtcgcgatcggacagaagataaacgtggccggctatccgtttggtatgccgttcacagtgactgaaggtacggtttcttctcccagacagctgattaacaacagttattatattcagacagatgctgcggtcaatccgggaaatagcggaggtcccatgttcaatgaacgtggtgaattgatcgccattaccgccagtaagatcaccgatgcggataatatgggatttggtatccctgtggatacactgaaaaaggtactggagaatatagaaagtctggaccgctctgtttttaatgtgcagtgtaatagttgcgatgaattcatttccgaagaagatgaatattgcccttgttgcggtgacaagttgccggaagaaatctttaaagagaggggactgaccgatctggctgtattctgcgaagaagccgttgaagcgatgggaatcaatccggtattggcacgtgtgggatacgaaggctggaaattctataagggaagttcggagatacgtatgtttgtgtacgaccgttcttatttgtttgccacctctccgctgaatattctgccaaaaaagaatctggaacctgtgctgacctatttacttcagacagagattgctccttatcgtttcggactggatggaaatcagatttatctttcttatcgtgtgcatatatctgatatattctccgattattcggaaaatgtcaagacgaatctgacccatctggctttcaaggcagatgatctggataattatctggtggatacttttggctgtgagttttccgaatatgctaataaaaacgctatctgaccaataactaaactatttgaatatcactcctttcgctgaattattgaggcggaaggagtgtcttttttcctccctgccggacactcgcaaatctatttttacgaagaataacgaacgttatataggtttcaaaaagctcaaaaaaggtaaaatgatgttgcgattctctgttattacttatacttttggacgattaacaactaaaaaacacaataaagttatgaagaaattgatttttttatttgcattttgccttactgtgactaacattttcgctcaaactgaccctagccaattgaaaaaagaaggaagcgacgcttttaatgccaagaactatcccgtagcttatgctaaattcagcgagtatctgaaacaaacgaataaccaggattctgcaatcgcttattactgtggtatggctgcagatgaagtgaaaaagtatgcagaagctgtgactttctttgatattgctattcaaaagaaattcaatataggtaatgcttatgcccgtaaagcgctggcactggatgctatgaagaagactgacgagtatgttgctaccttggaagaaggtctgaaagtagacccggacaataaaacaatgattaagaactatggtctccactacctgaaagcaggtatcgctgcgcagaaagccggaaaagcggaagaagcagaagaatgctttaagaaagtgattcctttggatcataaaacatataaaaccaatgctttgtatagcctgggcgttttatgctataacgacggtgcgaatatcctgaaaaaggctgctcctctggcaaactctgatgcagacaaatatgctgcagaaaaggaaaaggcagatggcagatttaaagaagccataggttacttggaagaagctaccaaagtttctccggaagatacaaagtctaaaactatgctttctcaagtgcaagcagctatgaagtaaactaccaattccagatagaaagggttgccggggaacgttttggcaacccttttttattgcttctttttttgaatgatctactttttgcgtacttttgctttcccaaaaagaaagactttatgcaattatatacaagagaagaaacgattcggagaataaaccatttagggcaatcctgcaggccttttatttttatcattaattatttgcaggatgcctcttatgtagaagaagttgcttctgttgacccttctgaagtagtgtataacctgaatgggtttaccaatcaatctttctcgaatgatgtgctttcttgctctgaaaagcctgtccgctggaattcttatcccgaatctttcgatagttaccgtcggtcatttgatatcgttcaacggaatatatttgccggaaacagctttctgaccaatctgacatgccgcacgccgatagagacgaaccttagtctgaaagatattttcttccgttcaaaagcaatgtataaattgtgggtcagggatcagttcacagttttctctcccgagatatttgtcagaatccaacagggaaaaatcagttcttatccgatgaaaggtactcttgatgcatcattgccttcggctgtccggcaactgatggatgatccgaaagaggctgccgaacatgctactatcgtagatttgatccgcaatgatttaagtatagtggccgatcgggtatctgtgtcccgatacaggtatattgataagttgcagacgaatcgcggaactattcttcagacgagttctgaaatacagggaaccttgccggataattatcgggaaaatctgggacacattcttttcaaactcttgcctgccggttctatcaccggtgctcccaagaaaaagacgatgcagattatcagtgaagccgagacgtatgagagaggattctatacgggtgtgatggggtatttcgacggaagtagccttgatagtgccgttatgatacgttttgtggagcaggaaggcgacagaatgtattttaagagcggaggcggaataacctgccgtagtgaagtggaaagtgaatatcatgaaatgaaacaaaaagtatatgtgccaatttattgaaacgattcgcatagaagacggacaggtttataatctgtcgtatcacacagcgcgcatgaaccggactcgtgccgccttttggaaagaagcggctcccattgatttgtccggctttatatctcctccgtctctgtccggtatctggaagtgccggattgtgtacgataaggaaatcgaagaggtcggatacactccttatcaaatgagaatggtttcttccttgcgtccggttgcttcggacactattgattatagttacaagagtaccaatcgggaagaattgaatgatctgtttgcccggagagggaaggcagacgatattctgatagtgaaagacggatatctgactgatacctccattgccaacatagcgctgtatgacggacatacatggtatactccggctcatcccttgcttcaggggacgaagcgtgcggaactgttggataatcggttcatagtggagaaagatatccggcaggcgcaattgggcgattactcccatatcatgttgttcaatgcgatgatagactggaaacggctcatcatacctgtcaatgaaaaatattttattctataactaaaattaacggaaatatatacagaaccgttgaacaaagcctctttttaatctgttatatttatgtgtttttcatagtattagataaagattaattaaaagagattgtacttcacttgtgaaagcttagagtacatcagaagcagaagagtctgtttttttgataaatgtgttagagcatcggttttaccaggccgatgctttttttatgtccttttgttgcgttttgtagtttatatgaaataaaatttgtacgtttgtagggtaataatagaaaatgatgaagatgaacatacccgttatctttcagtttttaaaagatctttctgcgaataataatcgtgagtggtttaatgagcaccggtcagaatatgaagtagcccgtgccgagtttgataactttctggcaacagtaatcgcccgcatttctttgttcgatgaaacaatccggggaatccagcccaaagattgtacctatcgtatttatcgggatacccgcttctctgcggataagacaccctataagatacattttggcggttatatcaatgccaaaggcaagaagtccgatcattgcggatactatgtgcatctgcagcctgacggaagtatgcttgccggaggaagcttgtgtttgcctcccaatgtactgaaagctgtccgccaagccatttatgacaatgtggaagagtatatctccattgtagaagaccccgaattcaaaaaatattttcctgtagtgggagaggacttcatgaaaacagttcccaagggattcccgaaagattttaaatatattgattatctgaagtgcagacagtttgtctgttcttatcttgttcccgatgattttttcactcgggcagacatgatggagcagatagagaaagcattccgacagttcaagagatttgccgatttcatcaattacacaattgatgattttgaataaaataatacctaaaaatataaacttaaaaattaaactcatatggtagtagatactttagaaaatctggaaaaatacgcgtctttgaatcctttgtttgcacaagctattgagttcttgaaatctcatgacctccaagccatggaaataggcaagactgaactgaaaggaaaagatctgctagtgaatatcgcacagacaaagcctaagactaaggaagaggcgaaattggaaacgcataatgaatttattgatattcagatcccattgtcgggaacagaagtgatggggtatactgctgccaaagattgtgtgcctgccgacgctccttataatgtcgaaaaagatattactttcttcgaaggactggcagagacatatgtagctgtgaaaccgggaatgtttgccatcttcttcccgcaagacggacatgctcccggcattactcctgatggagtgaagaaagtgatcgtaaaagtaaaagcataaacctaattcaattctgatatgaaagagacactcaacattatcaaaaacgatccctggctggaacctttcgcagatgccattaccggtcgtcaccagtatgcactgaacaaggaagccgagttgaccaataaaggaaaacaaactctttcggactttgcatcaggctatctttattttggtctgcaccgtactcccaaaggatggacgttccgcgaatgggcaccgaatgctactcatatttatatggtaggtacattcaacaactgggaagagaaagctgcttataagctgaaaaaactgaaaaacggtaattgggaaatcaatcttccggcagatgccattcagcacggagacttatataagttgaatgtgtattgggatggcggacaaggtgaacgcattcctgcatgggctacacgtgtggtgcaggacgagcagaccaagatattcagcgcacaagtctgggcaccggaaaagccatataaattcaagaaaaagacatttaagcctgctacgaatcctttgttgatctatgaatgtcatattggaatggcacaacaagaggaaaaagtaggcacatacaatgaattccgcgaaaaaacacttccacgcatagcacaggaaggctataactgtattcagattatggccattcaggagcatccttattatggtagttttggctatcatgtatccagtttctttgctgcttcctcccgctttggtacgcctgacgaactgaaagcgctgattgatgctgctcatgagatggggattgccgttattatggatattgtccattctcatgcggtgaaaaacgaagtggaaggtttgggtaactttgccggtgatccgaaccagtatttctatccggctcctcgtcgtgagcatccggcatgggattcactatgctttgattatggcaaaaatgaagtgatccatttcttattgtccaactgtaaatactggctggaagaatataagtttgatggattccgttttgacggtgtgacgtctatgttgtattatagccacgggttgggagaagcattctgtaattatggagattacttcaatggtcatcaggacggcaatgccatttgctacctgacattggcgaatgagttgattcatcaggtcaatccgaaggctatctctattgctgaagaagtttccggtatgccgggacttgcggccaaagtagaagatggcggttacggatttgattaccgtatggctatgaacatccctgattactggatcaagactatcaaggaaaagattgacgaggactggaagccttccagtatgttctgggaagtaaccaaccgtcgacaggatgaaaagacgatctcttatgcggaaagtcatgatcaggcattggtaggagacaagactattattttccgtctgattgatgcagatatgtattggcatatgcagaaaggcgatgagaattatgtagtcaatcgcggaatcgctttacataagatgatccgcttgctgacatcttcgacgatcaatggcggttatctgaactttatgggtaatgagttcgggcatcccgaatggatcgattttccgcgtgaaggtaatggatggtcttgtaaatatgcccgtcgtcagtgggatctggtagataacaagaatctggcttatcactatatgggggactttgatgctgagatgctgaaagtgatcaagagtgtgaaagatttccaggcgactccggttcaggagatctggcataatgatggtgatcaggtattggcttatggacgtaaggatctgatatttgtatttaacttcaatccgaaacagtcttttgtagattatggtttcctcgttagtccgggagcttatgaagtaatcttgaatacggataatgttgcatttggcggaaatggtcttgcagatgattcagtagttcatttcacgattgccgatccgttgtataagaaggaaaagaaagagtggctgaaactctatattcctgcacgtacagctgttgttttgagaaagaagaaataactcagggaataaaaaataagaaagcccttgccgagcatttaatgtttggcaagggctttttttataagaatgttcccggaccgagaatgtcgtacatataactgacattgcgggtttttagcaacattccttgcggggaataaaagagctggtatttgatatctacattatcttgtcctaccttaatgacgatgattgcctgccatttaggaaactccaccatggttacatcatttactacccaactggcataaggaccggatacaaaggcattgtatacggtaggtgtcacccggtcgagactgacaaggtccgtctgtgtcatttgccattgagcctgcgtattgaaccagacgtttttagtgaatccattcataacaaagttagcgcaataatagccatcatcctgcgaccatgctataccgttggctttggggtacatctttttgaaggcagcctgtatattgccgggaggtaagattgcgaaggcagatacagacaataataatatgactgccaaaaaactaattttcttcataaggttctggtttaggaaattatttatctaactaaacagcctttgagaatttttgttttcagttggggggaataaatcagtagtatctccattggggctgcctaaaaagtcaatagtatcatcaattcccctcccttcgggaagctaccctttatacacaagtcttagctgattaactcatacagttcaaactgtgtattaaatctatccagtccattcttaaaggttatatatcctggaatggactggctcttgtatgcactccatgctcctaaccttgcaataatccatgctgcccatgccattgattcttttttatatggattttgctgtattttggtatttccctcactcttttttcctactatatgtaataatgctatttctttgcttgtaaagtagatttctgaagagagtttttcatcttctttatcaaaagaaagtttgagtaccatcacctgcagggctgcctgcaaggaaattaagattagtttttgtaatgccgaaactgtttccaactgtgcgtcctcaatcatgaatccctttcttttgagcactctgaacaactcttcaatcagccatctacaacgataccaaccgatacattcaattgcttgttctacagtctccaccacatgtgtagttagcagtctccattcaatagggctctcatttaccggtgtactggaagatttttctttaacatgtatgcaataaagactaacagggggactgccctttgccggaccgttaacaggagcgcacaaggtgactctttcaaagcgaagttccatgcacgctacccgtttcttacgtccgcttcccgggagcacttcaaagctatactctgcccgtagaacagcctgctccattaatgtattcagatggacagaacagtctggatcatccaaccggcaattcctttcatgaacagaacgtatcagcaagtgaacattatcagtagggatacggctgaaaagctcgaaaatgtccgcttcacggtcaccgatgatcgttttaactgcatcccggggcatttgctcactggcagccattccactttctatccaacgatatgactctttttcttctataggctgatatctgtaattacgttcttcacgacttaaagcagccggtgagcgattccactgcttaaccgaagaaaagcctataggaatatgactggaggcatccactaccaagacaggatgcaaaaaagtaccacattgcttttgaccgacaatgccgggactggctgtttttttcttcattcgctcaacatgagcctcatagtttatctccgaggtatcttgaatacacagtaaatgcttacgaccggaagcattcttacagcaagtgtgtatcagacctgataagatagcatcagagctgactgaggaattgttcaaaaatctataagcacccatcttttctttatgttccttactaaattgattcactatagcactttgatggacaaccatctgagagcaaattaagtttaaacgccgcaaaagccgaggatcacgaatttgatctgtctctaataacatcaagcaaagataaaaaaaataatatatacttgtgtataaagggtagccttcgggaaggaggagagttaagatactattgatttatcatttgccttcaatcggagcagatcagaatgtaatcttcagaatcttcccattataggccccaacggaaacctcagtggctttgtaaggcaataaacagatttcctctttggcaccggtcaataagtctgtagcctgatatttttccatttgtggtatctgtaagaaatcaaacgcgtgagaaggtacgttgattgctacatcaaccagttggctatcgaaattgacgatgatgaacagcaattcattcttatactttcgcataaaagtatattgcttatgttcgtcgaaacgccatccgtttttattggcgtacatcaggtcgaagaatactcctttggcgatggatgtctcttcattacacagcgtaagtactctttggtaaatgctgtacaggcgtttatgctcttcggtcagcattttgccgtcaaacttaccgccattgcgccagcgacgaatagtatccacgctccagtaatcgaatatcgtagtccgcccgtctcttccgctgaaaccttcgctgtccattcccagttctccaaactcctgaccaaaataaatcatcataggattggtgttcatacaagcagaaacgatcagagcagggattcctttacgtggatctcctgcaaagaaatcggaagcgatgcgctgttcgtcatggttttccaggaagttcagcatttgtttttctattccgttcagactttgccagcagtgggtgatggatgccgcggattcgtagccgcaagctacattgcggagtgtatcgtataaaccgaccttatcatatagatagtcaaatttcccacggaagagataattgcggtattcgttgggattatagacctcggcaatgaaaaggatttccggatgtgcttcctttacttgtggaatagcccattcccaaaattctacaggaaccatttccgccatatcgcagcggaaaccgtcgataccttttgaggcccagaataaaagaatgtccagcatctttatccaggtatccggagtcggggagaaatggcaagtgccgccattcagataatctactccatagttcagcttgatggtttcgtaccagtcgttgatgttcggtgtagcgtcaaaacggttgttacctgtcgctttggccggatattcatggtaaggctctgctgcaccttctttcatatcgaactgggcacgcaactcggactgcggtatatagtagaaattgttgtacgggctgaaagcgtagtttgggtcatcgtttgctcccagttcggtagtgccgtccggttgtgcatccgagtgatactggcgtgctacatggttggggacaaaatctataataactttcagtccggaacggtgagtgcgatgtaccagattctcgaactccttcattcgttccggcacatcggttgccaagtccggatctacatcataataatccttgatggcgtagggagagcccgctttgcctttcacgatggcggggtggtcgggccgtatgttgaagcgacggtaatccgtctccgttgcatgctcgataatgcctgtataccagatatgggtagcacccagtttcctgatttctccaagtgccttgagggtgaagtcggccattttaccacatccgttggcggtaatgtctccattatagacacaatggttgttattgtttccgaacaggcgtgtaaacacctgatagataatcattttattttcgttgttcatatagagtagattttatttcatatcataaatattttcgggaaaagtaaggagttacttccatattttccctttttccgccagtgtctggtcaagtaagtcattggctatcttatagccttgctcaaagatttcttctgctttttccagttcggtgttgctgtatccatagaggttgtatggctcgatcagcaagtcacatttttctctttcggggaaagtattggcacggaacataaagtggaaggagcgcatggcaatgcttacgatattcattttatagtcttgcgccatgatgggacttacattgacggctaccaccttgtcacatattctgcggagggtggagaccggaaggttcatcattaatccgccatctacgtaattggttccgtcgatattgaccggagcaaacatgacaggcatacagcaggaagcagccacacgttcggctatggaaccacggtggaaatgaaccatacgtccgtggtccagatcggtagccgtgatgattaaggggatttgcaactcttccagattcttggctttcagattggtatggagaaagtcaataaattcacagaggtcaaatagtcctttcttggggatgactaactttgtcaggtcctgaaacttatggccggagaagtattcaatcacttggtgaggttcatttccgtcggcataaaaaactccggcaagcgcaccggcacttactccggagataatgtccggtttgatgtcatgctccagcagagcctgcatcacccccagatgcgcaaatcctttaataaatcctccgcttaaagcatagcctatctgatatttacggctattccagttatttgtgaatacctccatgagttactttcttttttagttcgccacgaatttagtgaatttattgaaagtaggaggaatataatggatagtttttttgaattgtatacaatcctctgaaagctatccatatttaggctgatgcggctagaatccgaaatcgtctatctcaactttatgttcttctgattctttgaaaggtttcgcttctttctgcacagggtttccttcgatatatacggcacggaacgggcgggcagggcagacgtattcgcagccgccacatccgacgcagatctctgtattgacgtggggaagagtcagtccgtctttgtagggtaccatagcaatggcttgcgtagggcaatgctctgaacaggctccgcaactggttccgtcagtgaggacaatgcaattttcttctataaagacgacatagcccatctgagtgagatgtttctgttctaccgtcaacggagggatggcaccgttgggacagacatcgctgcatacggtacagtcgaaattacagaatcctttttcgaaactgaccgttggctgcatcacaccccccagaccgtattccatgaaagcgggcttcagtacatgtgacgggcatttgctgacacaaaggtggcatgatgtacaatgttgctggaaacgtttctggctaacagatcccggaggagtaataggattttcttttttgtatgcctttttgccttccatcgtcgcaatggactcttgcgctttcgtaagaagcgtgggagctgctccggcagtagccagtccggcaagcagaaaacgacgtttggaagaatctgcagcaacggaagatgattctgttgccaccggttgtttttctgtagcggaagaacgttgttgtccctttgaagcaggggcgtaaaccagcgctttctgtttgcaggcaccgagacagtcgaaacagtctacacagcggctatagtcaatagcgtgttctttgctgtggatacaggcagctttgcatttggtagcgcaaagtccgcaaccattacattttgcggtatcgatacggactttgaacaaagagtaacggctcaaaaatcctaataccgtacctaccggacaaatggtattacaccacgtgcgtccgtgtttccatgccaatataagaatggcggcaaaggtcagtatcgctataagaagggaagaaaggcttaataccgaggtgtctacctgataaaacgtgtagttgtcgaatctggaaaatacggattccagcaggttgtttcccaacatatacaccggtttgaagatatgtactacaatgcgtccgtatgcgctatacgggtccagcaatcccaataccactgagaagccacatacggcggcaattacagtcactccgagcacggtccatctcagtatattctttgcaggactgtaccgatatctttttttcttctttcccacagactttgaaatgcgtgctataacatcctgccatattcccatcggacagatggtagagcaatagatacgtccgaacaacagggttagcgcaatcagcacaatcagtatgcctatgctgagagatagcacggcagggacaaactgtatatgtgccaaccgatgaaaactgttcggcagaatattagcaaaatcgagaaaataaaaagtaatcagtgcaaaaaggacgactgatattccgatacgtatctttcttaacatggtggtttacatcttaattcgcttgacattcagtttgtcgatgtccatcgttcctactttcagtgcttctcctttggcaaggtgacctacagtgtccagcggcatttcgcgtacttgattgaagaatttggctgcggctgtatctacggctacgatatccggtgagataaagagacctttcgccagcaccacgtccgaagcggaacgtcctcgcggtccgttggtcttcatgatacggtaggcgtctacgacattaagcacagctttcttttccagtgtacagatgtccgcaatgcattgctgcaggtcgttctggtggaagaagccgcggtcccagacgatacccatatggtttttcatggagatagtcaggttggcgcctccgtgattcttcaggatagggacgttaatccatacatcacaattcaggatggcttcatgtattttcgccttcttcatcttttgtccttttggcaggtcaacgggtttgtagtaagactccaggtgggccggcataactttggctccggcttcttttgctgccgcttcgataccgctgtttttgtagcacttctgccaatcgtcgcaggtatggtcgaatacggtgacctctttggctccggcggcaaaacattgtttgatgatttccgtgatcagtttcggattcgtgtttcctgccagttcgggtactttatcccatccgatattgggctttaccactactttctgtccgggcttgacgaattgcttcataccgcccagctcgctgatagcacgacggaacatggcttccggttcgccgcccatgacggctaccaggtccggtttatcaccatttgccttattgattgtctgagtcagtatctccatcgcctctgaacgctgtatagtcatggcggcaccagtaatagctactgtctttaaaaaatcccttctgtccatctttcttttttagtttagagttttgcaattgcctttagcagggcgtatccgccaaaccattgaatgagcatccccggaatgccgatacggaaatcttgtactgcgatatagaaatctccctcgatcatccattcaaaagcggttcctatgagttgataggagagaattactccaaggacggctaacaaagaaacggttttcatggtacgcgcagcaagggcggaagcaccggcaagcaaggttgattttatcagtataatcgggagaacggcttcggatggcatggcaaacaagacatgattgatgacaggagaaagaacagctgtcagcaatcctacccgaaagccgtatttataagcggcaattaaggtaaaaaagtaaattggtaataaagtcggtccaccgtaaggaacgaggtggcacagttgtggaagtgcgatgttgcctgctacgaataacagggcgaacaggtaagttttcacattgctgtaattcagcgaatagagtttggcggatgtttccattttcattgatgactttaatgtttagattgatgatatcttaaagattagactattctcgtttgaaaaagtttaatcggtctcataatttcttggccggtcaaatcatgattgggctttgatgtttacaaaagtagtacaaattttcaatgaaacgtattattttatcgctttttgtttattcattgaagtgcgtgaaccggaacagtggatttctccttccggtgacaatgaaaaaaatgtatgatttatgaatcatcggtgtttgtgtttataataaactttgtgatagttttagtaaaacggtatctgagtttattataaacgatgtaatcccgtttatggctttctgtgctgaaatttggcaacaaaaaaggctgcgatttccattggaagtcgcagccttcagcttgtataccgatgactcatatcttattcgttatagggaaatagatatgtcttgttgtaatattgtactttccttacggactgatcaatcttgactgtatgttgccgttcatgtgatacattacagcaggtgtgttgaaagacagacttcttttcattggttacggttttataggtttattattgttctgcttacaaatatacaacattaaaaaggctttgtcaagtcctgacagtaataacccgttaaactctgaaaaagtatcctgtttagaaattaatatcggatacgttcttcttgcattcttcaagtctttccagcgtctccttggataactgcggataatgtaagtccagtttttccatgcgttcacagataatttgcccgacggcatatcgcatgaaccacttgttgtctgccggaatcacataccacggagcaatctctgttgaagtttctgtcagtacatccgagtaggctttcatgtagtcgtcccagtattggcgttccttgacgtcggcagaagagaatttccagttctttgattcatcgttcagtctctccatgaatcgtttcttttgttcggctttcgaaacgttcagaaagaatttgatgatgaccgtcccgttttcagtcagataacgttcgaaatcattaatctgccggtagcggcgtttccagaagccgttgtctatatcttccgtttttagtattccgggtagcttgctggataacaggatttcgggatgcactttggctattagtacatcttcatattgggaacggttgaagattccgattcgtccccgttcggggagcgaacgattgattctccataagtagtcatgatccagttcttcggcagaaggttgcttaaaggagtacacctgacacccttgcggattgataccggacattacgtgcttgatcgttccgtcttttccggcagcgtccatcgcctgaaaaataaccagaactgagtagcggtcttgtgcataaagcatactttgcagttctgatagcttttctatattttggactaattgttctttggcatcctgtttggacatatcagcagtaaatgagggattgaaatcggatacatgatgttctttgcccggtttggctgtaagctcttttaagacttcttttttcattgttgtataattaggttgttataggtatataacagttgaataaagaaatcagttcttgccaaattaagagtgttgaatagtaattccccaattatgtatcaacagattctacataattccacactaattccacagttatatttatatcgcctgctatttatatgtttgattatcagttgtatatatcagagtgagacgtttggcatctgctttgccatatattaagtacaagaaacaataaaaacaatagttctattatttacacttaaaaaattacgattatgaaaaagttattagtagcagtagcattggtattgggattaggtagttctgtagcattcgcacaggaagtaagtaacactccggcagtggaaactcagacacaagctccacaggatgagtatacaaagattgaagtgaaagatttgccggaagcagtgacacaggcaatagcgaaaagctatgaagatgctaccatcaaggaagcgtatgttgccgaaaaagaaaccggtaaggtttataaagtaattcttactacaaaagacgctcaggaagtaaccgtacttctgaatgaaaaaggagaagaagttaaagagataaagtaaaacttcgaaagtaataactcatagagaggttccggttcgtgatgaatcgggacctttcgttcgatgtattaggttctgtaaaatatagtcggtagtaatatatatggtaacaaagcaaggaggcttacgacttatttttaagtaattcataataatgtgcatcaatgaactggccattcttgaagcaagctttatgatgtattcctgttttctgaaatcctgctttctccaacacacgcattgatgcggcattgtgttcatagaccgtagcatataggcgtattacgtctgtacgctgaaaataatgttctatggctcttttcaaagcagctgttgcaaggcccttgttccagtatgtttccgaaatccagtaaccgacttctgcattgaagcgttcgacatccgttccgcggacgaatccgatattgccgattgcctcatgattcgcctcgatgcaatattcattctgttccacttgttccgaagcgtatttaatgaaggtatcagcatctgtttctgtatatggaaaaggcagcccatcacggcagttatcccatatcttcttattattcagatgccttgctaaggttttggcatccgattctttccagggacgaagtataaaatccatattcttattctttgtagctattatggtttctttcccgaatctttccccatgcgtgtgtgtcaaacaggcaactgctgcgcatagtctcatacatcaccttaaatctcgacatcggaatggtataactcagtatatcagcctcaaaataagggcgtacagaaggatcaaagaatccgatgaatgttctgtatccgcctttacgattctccagaatcgtctgtgtgaccacagaactgcatcccgacccgaaagtggaaatcactgtatcctccttattattatcgaagaaagcccaggtagtcagtccggacaatatatcgggattgaccagaaaaaggattccttccaaatgatcgaacgtttccactttatctatacgggcaaaatgcagatattccttttctgcccttggtactcccagttgctcaataaagctttttaccatctccggcgtctgcttatatcgttcctttagagatacgaacgtcggcacgtgctcgggcatatcggtgaatccggtataaaacttaccgccgccgcaaccaattgtttccgcattcaggctgatggtattaccttctctgactttactcatgcttttaaagaagcatccgttcactttcgccgtttcattttcaagaatgtccgagtaccagaatacgataggcaattcagcatattcgccaaaagcttcccgatagttttcgatgaatttttttatttccataattggttattttatctacgtacaaagttaaactaaaaaagcaaggagcaaagaataaagtccgaaaatatgcgtttggtatacggagcgatgaagttggtctactatttcttatcctcgtggtataaaggcatatttttgcgtcattcaaattaaaaataagaaagaatgaagtatgttatcgtaagtatgtttgccttgctcgtgtggatgccaaaagttatgagggcacaagtgattgttaaaaccggatatatctcatcttcctcctacaaagatgagaacggacagcagacaggagggaagggggatctgaaatttgtagaaggaagcgtgaatattcccgtgtcacagaaactgaatgaacgaaaacagcctactatttgggtagtctcggcagggggaggctatacttccatgaataatcagaacctgcagtcttatatcgacacagatcagacaataaacctgcagctgggtgtaaccaacattcgccctatcagtaagaaatggatgctgctgactacggttggggtaggcgtttatactgcttccgatataagaatgaagaatgttttgggacagggaggagttgtctttatccggcagttcaagccgaatctgtctcttggagccggactggcaataaataatacatttggctatccgatgatttttccggcgatatacttcgactggagcactgagggacgctatcagatcaaagtttctatgatgaatgcgatggaactatcggcaggaatgaatctgaataaatatctgaaaataagtctggtagcagagatgaatggcgcattggcactggtggaaagggaagggagagacgccatgttctctcagcaatacatcattgtaggattacagccggaactgaatcttagctcttctttcgccataaccgctaccggaggattatcgtgcagccggattgcttattacacaacacgtacactgaaggcctttttcgaagatatgtccagagatacggacccttatttcaaaccggctgtatatgtttcgatgggaatgaagtataagttctgaaaaagtagtaactttatcgccttatgtcagtgaaacgaacattatattcagcattaaaagtcataggggtatttctgatcatatcctttatggtgttcaggggaaatctcgtcagggaagtcggcttcggatttaatttgtcgaccggcataaacctgctgatgatctttacgtttatgggattaatctatctgaatacgaatgtgctgattcctaagtatctgtttaaaggacgctggaaggcttatgctgtttacatgggataccttatcggatttatgtcactgtttatgatgagcggtctttacattctgaagcagtattataagattcctgaccagatcgtaactatcaacccggttttctttcttttcctgttgattaatgtcatagcatttatactgtatttcctgactttctcttttactctttttttccgtcgctgggtgacggaccagcaactgctgaataaattggaaaacaataatctccaggctgaactgactcgtctgaaagaacaggttcagccggactttctttcgaaaatgctggatgaggcgcaactgctggccaagaaagatgcggataaggcttcggcactgatatttaaactgagcagcctgcttcgctatcaactttatgagagtgcacgcgaaaaagtctttttaagtgatgaaatccgttttgttacggattatctggatttagagaaaatgtgcgatgaacggcttgaatataagattcaggtggagaatgaggtacgatatattcagattcctcctttattgtttatgccgattatagaatatgctgttcgtaaagaggtagaaaacgaagagggaacggagaagcatatagcaattcgttttcaggaaaaggaagaagggttgctttttacttgcgtataccgttgtatggaggctgatacacggcagcgtatgtctcagactccggtacctgcattggatcagcttcagaaacgactggagttattatatcccggacattatttactggagaatcagtatgatcatcagtcgtcatgtaccaccagcctaaaattgatgcaatgaaagatacggaaaatatatatgattggggaagaatattggttgagcgccgatacaggctgattcgtcatttattgctgatgtcactgatcggttttctggcgtttcagaatgtgtatggcagctttcataaagaaggttttctgtatgcgtatatggtaagtgtatttatattcgcttttcctatctatatcaatatttatcggctgatcccccgctttttggacaaacgtcggttcatgtcttattgggcatcctttatggggattattgtttttagtgccttattgggactggtttgtttttatccgcttcaccggcaatatggtatcaacgaatttagtttgcaggatggacaaaccttttcattcttgagtatcattcactcgatgcttgtacttacgttgatatcggggagtagtaccagctttgaaatgttccggcgctggatggtttccggcaggaaaatatcggaactggagaatacaacgatgcagacggaacttcaacaattaaagaatcagataaatccgcatttccttttcaatatgctgaacaatgcgaatatattagttaaggaagaccctgatgaagcgtcacagatattgggcaaactgaatgatctgcttcgctatcagttcaatgacagtacccgcaaggaggttttactgagtgcggatattcagttcctgaccagctttctggagttggaaaaggtgcgccgggatcattttgaatatctggtgtcgaaagaaggggatatggataatgtttgtgtgccgccgttgctgtttattccatttgtggagaatgcggtgaaacacaatccggatagtgataacttgtcttatgtacatatctattttgcgttgcgtggccgtgaactctcattccgttgtgagaactccaaacctcccgttccagtgaagcgggaaggagggatcggattggcaaacgtgcgacggagactggatttgttatatggctcaggatatacgttacagataaaagatttagcaaccacttatagtgtcaatttacatttaagcttatgaactgtattattgtagatgatgaacccgtagcacggaaaggaatgaagtctctgatagagcaggtttcccagttagagttggcaggcagctttaatagcgctattgctgcatccgcctttatgaatgaacatacagtcgatttgattttcctggatattcaaatgcccggtatcaccgggatagagtttgcgcaaagcattcctgagaatacactggtcatctttactaccgcctacgctgaatatgcgcttgacagctatgaagtgaacgccgtagattatctgataaagccgattgaactgagccgttttctgaaagcggtcaataaggcggtcgcttatcataaactgttggtttcggcagaacctgaaaaggtggagaatatccgggaagactatctctttattaaatcggaacggaggtttttcaaaattaatttcagcagcatcctttttattgaaggactgaaggattattccattcttcagctggaagatcagcgtattataactaaaatgaacctgaaaaatatccacgaacaattgccgggcaaattgttccttcgcgtaaataagtcctacatagtcaatatttcccgcattgactcctttgatacgaatgacatatatataaagacttatgagatagcacttggcgggagctataagcgttcgttttttgaagaattcatgcctaagtatcagcaaaaagaataaatatggcttctgactttattacagactctcactggaacgcccatgcgttaagttttggtcttatttcataaaaaaaggtattttgcaaaagaaaaaggagagaacatagtgcattattcctgcgaaatgccgttatttgcactcactaaacaataaaaggtttatttcgatttgattatttcacatgaatcttctcatttattgagcatatccatctctgattaagaacttccaaagaactttgttattgaaattattaattttttatatttgtattttatgaatttgtacattggaaatcttaactataacgttaaggaatcagacttgagaaacgtaatggaagagtatggagcagttgcttcagttaaattaatcacagatcgtgaaacaagaagatcaaaaggctttgcttttattgaaatgccggatgatacagaagcagctaacgctatcaaagaattgaacggtgctgaatatgtaggccgtccgatggtagttaaagaggctttgccgaagaactaattgactgaataacaatcagtatataaaaagaaggtgtgttggtgatcccaacacaccttctttcgtttctgaaaatcctgccggactatttcttaaagcccgaagaatttatctctctttttattgtctgcggttatttttttcttacctttggttcactatctgtatgtgtggatggtgtaattgaaaaactaaaggtatgaaagacaatttgagaattgccctcacattttccggtgggggctatcgtgctgctactttccatttgggtgcactatcctatcttcattctgtaaaagtgggtgagttcacattgctagatcatgtggttgctttatctaccatatccggtggtactattaccggcctgcgatatatgctgggtttaagtcgcggtgaatcagtaaccgatatttttaaagagctatatacttttcttacagatgtggaactggcgacagttgccatgaataatctggcattctatgataaaggacagtgtgcttctctgattcgtacgatggcggatatctataataaagaattatttaagggagccgtattaggtgatttgatggaccagttggatgatattcatatttgccattttgcggctaatgcaacggatttcaccaacgggctggcttttcgttttcaagtgacggaaaagacaggagtcagacaggagcaggctaccggttacggattgatcggaaataataaaataagaattccacgtgaggtggcacgtcatatccgtctgtcggaagtgctggcttgttcttcttgctttcccagcggattcgagccgttggtctttcctaaagattttgttttgggagattcggaggaagtgaagaagtttatcgcgaagacagaaccttttggtattatggacggcgggattgtcgataatcaaggtatcgagccgattcttttagcggaacaacggatggagaccagcttaggctgtaaagacggcaaatgtctggatctgattattgtttcggatgtggcaagcccgtatatgagtgcttatcaaccttccgatgtacatttgccgaaaggattgaaccggatgacactgaaaaaactaacagcatctatctggggagtcgggatcggactgactgttgcgacagcactttccttggtatttacctccacttctttcttgtccggtgtattggtggctgtatgggtcctggttgcgggtattctgattatatatacagtcatgaagaaaaagttgatttctgtggctgcaaagtcagtcattcaggacagtattccggcagtaatgaatcttcgctttggggatattgccacattgctggcaaatcgggtgagttccgtattgcttttggtgtcttctgtctttatgaagcatttgcgccggatggattatagaagtatatacagggatgatgactggaaaaacagatgtatgatgaacggtgtatatgagttgaggccggatgaggcgtgggcaagtaaattaaaatcaggacaactacccgaatatctgaaaccgagtaataagattcagcagcattctacgatagctactgctatgggtacgactctttggtttacccaggaagagaaagaagcaggagtacacgattctctgattgctgccggacaatatacgatatgctggaacttattggaatatattgagacgatcaagaaagacccttccaatacgaatgaacatcatcagcttattctggcttgtgaggaacagttgagaaaggattgggagaagttccagaaaaaccctctttgcggattagctgagtggaaaaacgaatagaaacaaaaaagacatcttaaatttaccatattaacaacaaaccgatagaagatgaatcaagaacttttaatgaatcctaactgtctggtggctgctttggaaaagcctgccgccgagtttactaaggcagatattatttcttttattcagaagaataatatccgtatggtcaatttcatgtatcctgccgctgacgggcgactgaaaacattgaattttgtaattaataatgcggcttatctggatgcgatccttacttgtggagagcgggtggacggttccagcctgtttccttttatagaggcggggagtagcgacctgtatgtagtgcctcgtttccgtaccgcttttgtcgatccgtttgcagaaataccgacactttcgatgctttgttctttcttcaataaagacggagagccattggaaagttctccggaacatactttgcataaagcgtgtaaagcatttactgatgtcacaggtatggagtttcaggcgatgggtgagctggaatactatgttatttcgccggatacaggaatgtttcaggctacagatcaacgtggttatcatgaatctgctccgtatgctaagtttaacgatttccgtacacagtgtatgtcgtatatagctcagatgggtggacagataaaatatggtcattccgaggttgggaattttacattggatggcatgatttatgaacagaatgaaatagagtttctgcctgttcgtgccgaagatgcggcagatcaattgatgattgccaaatgggtgattcgtaacttgggatacagatatgggtataatgtgacattcgcgcctaagattacggctggaaaagccgggtcaggtctacatgttcacatgcgtattgtaaaggacggacaaaatcagatgctgaaagacggtgtattgtcggaaacagcccgtaaggcaatcgccggaatgatggaacttgctccttctattacagccttcggaaataccaatcctacttcttacttccgtttggttcctcatcaggaagcaccgaccaatgtttgctggggagatcgcaaccgttctgtattagtgcgtgtgccgttgggctgggctgccaagaccgatatgtgtactttggcaaatccattggaaagcgaaagtcattttgataccagccagaaacaaacggtagaaatgcgttctccggatggttcggcagatttgtatcagctgcttgcgggactggctgttgcctgccgtcatggttttgagatagaacaggcattggacattgcaaagagaacgtatgtaaatgtaaacatccatcagaaagagaatgaggataagctgaaagcattggctcaattgccggatagttgtgcggcatctgccgaatgtttgcaaaaacaacgtgctgtcttcgagcaatataatgtatttagtccggctatgattgacggtattatacgcaagctccgtagttatgaggacaaaacattacgtgccgacctggaaggcaaaccggaagaaatgctggaactggtacataagtattttcactgtggataagcaataaaagcattctgcttataaaaatactacaaataaaagagggtgcacttcacacggtggcaccctcttttatttaatcttcattgttatcttcttcatcatctaccaggttattgagttcaagttccaagtctaccaagtcttgttcccataactttatgatatctttcggtgtatctttggctgccttcttgattctttcctgagcaacagatacttcatgctctaattgactacgtctgctcatacaattcaatatttaattaataaaattgtaaacaaacagccaggagaatagttcaataggataaatttaaaaatggacgggatgaactatttataaataagggctgttgtagtctaaaatctttttaaatatacaattatgctcaatttattagccgtgtttttagtctgttcaggtatcggaattgcagttcacatagcaatcgatctgacacatcgtccacaatcaatgaagataatgaatgcagtatggatattgactgcattgtggggaagttacttagctttatgggcttataataagttcggacaaggtgctcccatggagatgggaggtggtgaaatgaaaatggatatgtcgaacatgaaggggatggagatgtcggacatgaaagggatgagtatgtccggtatgaaaggtatgactatggatatgtcgatgggagatatgtccatgaaccgtcctcattggcagtctgtggctttatcggctttacattgtggagcaggctgcacattggctgatataataggagagtggttcactaattatatcccggtaaccgttgcaggaagtcagcttataggaaactgggtacttgattttatattggcgttgatcatcggagtttattttcaattctatgctattcgggagatggaaaggatatcggcgggaaaggcactgtcccgtgcttttaaagcagatttcttttctctgttgtcttggcaaatcggaatgtatggctggatggcaatcgtttattttgttttatttgtcaatgagcctttgcctaaagacacatggatattctggtttatgatgcagctggctatgctttttggatttttctgtgcttatccgatgaatgctttgttaataaagttaggcgtgaaaaagggaatgtaaatttcagatattactttatcatcgcggggatatattggtatataaaatagaaccacacggagaaatagagttttaggcttttatttctccgtgtggttctgtttatcttttcagtaacttaggaatatccgaaggttcttgtgcaactcgtataccggcagcttctaaagcctctattttgtcttttgccgagccggaacctcccgaaacaatggctcctgcgtggcccatctgttttcccggaggagcagactgtccggcaataaatgctactacaggcttatttacatgactgcgaatatattctgcggcctgttcttccgcgttccctccgatttctccgattaacacaattgcttttgtttcgggatcattttggaacatttccagtagcttaaggaaatgcagacctaccacaggatctcctccgatgccgattgcagtagactgtcccataccattggccgttaagtgatacactatttcataagtgagtgttccgctacggctgatgacaccgacatttcctttctgaaagacttgtcccggaaggattcctaccatactttctccgggagaaataagtcccggacagttggggccaaccaacattgctcctctttgttcggcaaaccgatatgctttgatgacatccagagtcggaataccttctgcgatacagactattagccggatgcctgcatccgcagcctccataatggcatctgctgcaaaacgggccggcacaaagatgatggaagtattagcctgtgtctgttctacagcttcatacatcgtattgaaaaccggaatgccgtctacttccgtacctcctttgcccggagaagtgccgccaacgacattcgttccatattcattcatcttcttggcatgaaaaagcccgtctctaccggtgataccttgtacaatcaaacgggtggatttatctattaatatactcatcgttccttcaatttttatgtgatttcatcttaagatttgatagccattaaagcggcttcctgcatagttgtagctatttgaaaacggctatggttgcgtaaaagatcacgtccgatatgctcattggttcctgtgagccggacaatgacaggtatatcgctcttaatttgatcgaatgcctgaataagaccgatggctacatcatcacaacgggtgattcctccgaaaatgtttatcaggacgacctttactttctcgtcctgtaatagaagtttcatagcttcaaccaccttgacagggttcgaactaccgccaatatcaaggaagttggcagggtttcccccatgaagttttatcatatccattgttgccatagcgagtccggcgccatttaccatacagcctatatttccatccatgtgaacgtagctgaatcctttgtttttagcatccgcttctactttttcttcttctgtaggatcaaacaaactcagtacatccggatggcggtaaagagcattatcgtcaaaaacaattttggcgtcaatagccatcaatatgcctttggcggtaagagccaatgggtttacttcaaccagtgatgcgtcattctccatgaaaatattgtagagtgcttgcagaatagcggccattctgccggcttgttccatgtgagggaagagcgagaatgcgaaacggcgtgccagataatccggcaaaccgatgaatgggtcaatagcatagcgaatgattttttccggtgattgccgggccacttcttcgatatccataccaccggacgcactcatcataaggatgaccgagcgtgtgtttctgtcaatggtaaagctgacatagtactctgcggcaatatcaaccgcctcgctgaccagtagctgattgacaggaagccctttaatactcatacccagaatgtttctagcttcctgataggtatcttctgtattatctaccagtttaacacctccggcttttccccgtccgccggtcagcacttgtgctttaataaccactttgtccgagcccattctcctgtatgcggcaactgcaccggcagccgttcgacatagggtatgcctttcaacagggatcccatacttggagaaaatttcttttgcttgatattcatgtattttcatggtccgcgaatttgaataaatgattcctataatgaaaacaaatgatagattcagaatgtttgctcgtagagaatactaatggtgtgttttacagcatattaattgtctcatgttttactaataagcataaaaaaacgtgtcggcaaattagccgacacgctctatcgttgagaaatggtaaagtatatctacggatgcttatgcaatgctgtgagcgtttactgtaccatctattttcttgatcaaaccctgcaatactgcacctggtccacattctgtaaaatcagtagcaccatcggcaaccatattcttaacagactgagtccaacgtacggaagcagtcagctgggcaaccagattctttttgatttctgcgggatcagtatgaggaagtgcatccacattctgatatatcggacatttgggagtatgaatttctgttgcgttgatagcagcttccagttcaactttagccgggtccatcaacggagagtggaaagcaccacctacttttaatgggagagcacgttttgcgccggcagctttcatcagttcacaggctttttcgatgcctggtacagaaccggagattacgatttgtcccgggcagttatagttggcaggtacgcaaacttcaccttctgcattaacagatgcacagatttcttctactttttcatccggtaatgcaatgatagcggccatcgtagaaggagttgcttcgcaagctttctgcatagccatcgcacgggcataaaccagtttcaatccgtcttcaaagctcagggcaccggcagccaccaatgcagagaactcaccaagtgagtgtccggctgtcatttccggtttgaaatcatcgcccatacaaagagcagagataacagagtgaaggaatacggcaggttgagtaacctttgtctgacgaagatcttcgtctgtaccattgaacatgatatctgtaatgcgatatccgaggatatcatttgctttttcaaacaattcttttgctaaagctgagttttcatacaggtctttacccattcctacgaactgagcaccttgaccgggaaatacaaatgctttcatatctttattatttaattgatttttaaatgcgggtgcaaagttacagatttttatgatacgaccgcacaaaatgtacacatttgtgcaatggagtcgggaaaatgccacagaggtccgttgccatgacctatattcaggtttttgcctgcaatgatggcatgagtaatgtattctttagcgtgacagatggagtctttcatcgagtatccctttgccagatagcttgcaatagcggaggagagggtacacccggtcccatgcaggtttttactttctatctttttctcttcatatatataataggtgtgatccggagaatataagaggtcgcacatttgatcgccttccagatgtccgcctttgatcaggatatgggtctgataactgtcggagagttgtttggcagcttccagcatatcctgtgtattttggatgctcttgcctgtcagcacctttgcttcatcgatattgggggtgactaatgtgacaagcggcaaaagttttttcttaatctcttcgatggcttcatctgtcatcagcttccggccgctggtagataccatcaccgggtcgtaaatgatgtgctctggtgaatatttccgtatacagtcggcgatgacatgaacgatctgaatatcgttaaccatacctatttttacagcgacaggttgcaagtcctccatgaccgcttcgatttgtccgcaaacaatttcgggtggtattgcatggacggcgcgtacccctagagtgttttgcacagtgacagcggtgatagcagatgccgcatagcctcctaatgccgagattgttttgatatctgcctgaatgcccgctcctcccgaacaatcggaaccggcaatggataaaatgacgggatgacgttccattttagattttttaatatttatccggcaaagatagaataaaaatggcaagatacaaaatgggatatcgtttgaaatacaataagtccgttgccggagaagacaaagagtgaatatgaaaagtgctgataataaagagtcattccgctttttgtactttatacaattactcgttgccggaacgggtaaaatacatattgtaattcagaagataacactaagtactcatattgtagattgtatgatatgtatatctatgaaaaacaatgttttatagcatatcatttgttattgttcgaatcataaagcgcccctatatttgcaccgtattaaagaaatagatatgcaaagtatacagaaaaaagcacccttggcaaacaatcacatatcagtagactgtgtagtgattggttttgatggagaacaactcaaagtgttacttgtgaaacgtgcgggcgaagataatggtgaagtatatcacgatatgaaacttcccggtagccttatctatatggatgaagatttggatgaagcagcacaacgtgtactgtatgaattgacggggctcagaaatgtaaacttgatgcaattcaaggcattcggctctaaaaacagaaccagtaatccaaaggatgtacgctggttggaacgggctatgcagtcaagagttgaacgtatcgtgacgattgcttatctgtcgatggtgaaaatagaccgggcactggacaagaatctggatgatcatcaggcttgctggattgccttgaaagatgtgatgacattggctttcgaccataatctgattattaaagaggcaatgacctatatccgtcagtttgtggagttcaatccttccatgctatttgagttgcttccgcgtaaatttaccgctgctcagttgaggactctttttgagttggtatatgacaagcctgtggatgtacgcaacttccataagaaaatagcgatgatggaatatgtagttcctttggaagaaaaacagcagggggtagcccatcgtgcagcgcgttattataaatttgataagaagatatataataaggtgagacggtagtaggtaataagtaataggtaataagtaataggtaataagtgaacaggctgtctgtttaaatatataattcaaaattttaaaaatcatcatgtttctattaggttatgatataggtagctcgtccgttaaagcgagtctggtcaatgctgaaacaggtaaatgtgtatcgtcagcgtttttcccgaaaacagaagcgaagattatcgcagttaatcccggatgggcagaacaagatcctgagagttggtgggaaaatctgaagttgtccacgcaagctattatggcggagtcaggagtgagtgctgctgagattaaagctatcggtatttcctatcaaatgcacggactggtatgtgtagataagaatcagaaagtattgcgtcctgccattatctggtgtgattctcgtgcggtgccttttgggcagcaagcatttgaaacaatcggagaggagagatgcctttctcatttgctgaactcgcccggtaattttacagcgtctaaactggcttggatcaaacaaaatgaaccggctgtctatgagcagatatataagataatgcttccgggggattatatcgccatgaagttaagcggagatatctgcacgactgtttccggtctttcggaaggaatgttctgggacttcaaaaataatcgtgtagccgatttcctgatggattactatggcttcgactcttcacttattgcggatatcaaaccgacttttgcagaacaagggcgtgtaaatgcagttgctgcgaatgaactgggattgaaggaaggaacaccgattacttatcgtgccggtgaccaaccgaacaatgcgctttctttgaatgtgttcaatccgggtgaaatcgcttctacggcaggaacatcgggagttgtctatggtgtgaatggtgaagtgaattatgatcctcaatcccgtgtcaacacctttgcgcacgtgaatcatacgatggaacagacgcgtctgggagtgttactttgcatcaacggaacagggattctcaattcatgggtaaaaagaaatatagctcccgaaggtatctcgtacaatgaaatgaatgtgttggcttccaaggcgccgatcgggagcgcaggtatcagcatcctgccttttggtaatggtgcggaacgcatgctgaataataaggagataggttgcagcattcggggggtagacttcaatgcacatggcaaacatcatattattcgtgctgcacaggaaggaattgtattttcttttaaatacggtatcgacatcatggaacaaatgggaattccggtcaaaaagattcatgccggccatgcaaatatgttccttagctccatcttccgtgatacattggcaggagtgaccggagctactatcgaactttatgatacggacggttctgtaggagcagcgaagggcgcgggtatcggtgcaggcatttataaagataataatgaggcatttgcaactcttgataagctggatgttatcgaaccgaatatagctaaacgtcaggaatacgccgacgcatacgccagatggaaatataatataaataacgatataataactttttaaataacaagaattatggcaacaaaagaattttttccgggaattgaaaagattaaatttgaaggtaaagatagtaagaacccgatggcattccgttattacgatgcagagaaggtgattaatggtaaaaagatgaaggattggctgagattcgctatggcatggtggcacacattgtgcgctgaaggtggtgatcagttcggtggcggaacaaagcaatttccatggaatggtaatgcagatgctatacaggcagcaaaagataagatggatgcaggatttgaattcatgcagaagatgggtatcgaatattattgcttccatgacgtagacttggtttcggaaggtgccagtgtagaagaatacgaagctaacctgaaagaaatcgtagcttatgcaaaacagaaacaggcagaaaccggtatcaaactgctgtggggtactgctaatgtattcggtcacgcccgctatatgaacggtgcagctaccaatcctgacttcgatgtagtagctcgtgctgctattcagattaaaaatgcgattgatgcaacgattgaacttggcggagagaattatgtattttggggtggtcgtgaaggatatatgtctcttctgaacacagatcagaaacgtgaaaaagaacaccttgcacagatgttgacgattgctcgtgactatgcccgtgcccgtggtttcaaaggtactttcctgatcgaaccgaaaccgatggaaccgactaaacatcaatatgacgtagatacggaaactgtaatcggcttcctgaaagctcatggtctggataaggatttcaaagtaaatatcgaggtgaatcacgcaactttggcaggtcacactttcgagcatgaattggctgtagctgtagacaatggtatgttgggctcaattgacgccaatcgtggtgactatcagaatggctgggatacagaccaattcccgatcgacaattatgaactgactcaggctatgatgcagattatccgtaatggtggtctcggtaccggtggtacgaactttgatgctaaaactcgtcgtaattctactgatctggaagatatctttattgctcacatcgcaggtatggacgctatggctcgtgcactcgaaagcgcagcagctctgctcgacgagtctccctataagaagatgctggctgaccgttatgcttcatttgatgggggcaaaggtaaagaatttgaagacggcaagctgactctggaggatgtggttgcttatgcaaaaacaaaaggcgaaccgaaacagactagcggcaagcaagaactttatgaggcaattctgaatatgtattgctaattaatatttaaaacaggcggtaaagcagcggtagggctgctgctttatcgcctgactttttctaatccaactactacactactttatccactttttaaaactatgaataatacaacgaacgaaggaagtaaactctacttgtattcgattacttctgttgctattttgggcggtttgctcttcggttatgatacggcggttatatccggcgcggaaaaagggctcgaagccttcttcctgtccgcttccgattttcagtataataaggtaatgcatggcattacttcttccagcgcattgataggctgtgtgctgggtggtgctttatccggtgtctttgcttcccgtttgggacgtcgtaactcattgcggcttgctgctgtgttatttttcctctcggcactcggctcttattatccggaagttcttttcttcgaatacggaaaaccgaatatggatttgttgatagcattcaatctgtatcgtgttctgggaggtatcggagtaggactggcttcagcggtatgtccgatgtatattgctgaaattgctccttccaatattcgtggaacccttgtttcgtgcaaccagtttgccattatctttggtatgttggttgtgtactttgtgaattatctgattatgggtgaccatcagaatccgattattctgaaagatgctgctggtgtactgtcagtaagtgctgagtccgatatgtggacagttcaggaagggtggcgttatatgtttggttcggaagctttcccggctgctttgtttggtatgcttttgttctttgtacctaagactccccgttatttggttcttgtacagcaggaagaaaaggcttactctattttagagaaaatcaatggtaagaataaagctaaggaaattcttaatgatattaaggctactgcacaggaaaaaacagaaaaactctttacttatggagtaacagtgattgtgatcggtattctactgtccgtattccagcaggcgatcggtatcaatgcagtactttactatgctccgcgtattttcgaaaatgcaggtgccgaaggtggtggtatgatgcagacagtgattatgggtattgtaaacattatctttacgctggttgctatctttacggtagaccgctttggtcgtaaaccattgctgattatcggatctattggtatggctgtaggagcatttgcagtggcaatgtgtgatagtatggcaatcaaaggtgttcttccggtactttccatcattgtatacgctgctttcttcatgatgtcatggggaccgatttgctgggtattgatttcagaaatcttcccgaatactattcgtggtaaagcagttgctattgcagtggctttccaatggatattcaactacatcgtatcttctactttcccggcattgtatgacttcagtccgatgtttgcgtatagcttatacggaataatctgtgtcgctgccgctatctttgtctggcgttgggtacccgagactaaagggaagacgctggaggacatgagtaagctctggaagaaaaacaaataagatatattaggttagtgattgtttgattaaggaaggtggccctttgagatcagtttctcagaaaggtcaccttttttatgtggaaaaaatagtgtcactatcctatgcatatagtgtcactatgtgtatgatatagtgacaccatcctcaccggatagtgacactattttaaaagtgcctttttcttgcgatgaaagtacaatgtacgaggattagctgtacctttgcactgtctttttataaaacatgtattgttatggaacaacatccaattaaaattaataaagtacagatacgtaatcttcaaattgaagactatgcacagttatcccaatcgtttacccgtgtttattctgatggtagcgatgtattttggactcatgcccagataaagaaattaataagtatttttccggaggggcagattgttacagttgttgacgacaagatcgtaggttgtgctctttctattatcgttgactatgacaaggtaaagaacgaccatacgtatgcacaagttacgggtaaggaaacattcaatactcataatccggaaggaaacatcctgtacggtattgaggtgtttattcatccgggataccgtggtttacgtttggctcgtcgtatgtatgaatatcgcaaggaactctgcgaaacattgaatttgaaagctatcatgttcggtggtcgtattccgaattatcataaatatgccgacaagatgcgcccgaaagaatatatcgcacgggtacgccagcgtgaaatttatgatccggttcttaccttccaattatcgaatgatttccatgttcgcaaggtaatgaccaattatttgccgaatgatgaggaatccaagcattatgcctgtttgttgcagtgggataatatttattatcagccgcctacacaggaatatatcaacccaaagacgactgtccgtgtgggactggtacagtggcagatgcgtagttacaagacattggacgacctcttcgaacaagtggagttctttgtagatgccgtatcagattataaaagtgattttgttctttttccggaatatttcaacgctcctttgatgtcgaagtttaatgataaaggagaatcacaggctattcgtggattggcaaagtataccgatgagatcagagaccgttttataaacctggctatcagttacaatatcaatattatcacaggaagtatgccgtatgtaaaggaagatggtttgttatataatgtaggcttcctttgcaggcgtgacggaacttatgagatgtatgaaaaaatgcacgttactccggatgaaatcaagagttggggattgagtggtggtaaactgctgcaaactttcgatacagattgtgcgaaggtcggagtgctgatctgttatgatgtggaatttcctgaactttcccgtttgatggcagatcagggaatgcaaatcttatttgtacctttcctgactgatacacagaatgcttactcccgtgttcgtgtttgtgcccaggcacgtgcgattgaaaatgaatgctttgtagtcatagcaggttgtgtcggaaatcttccccgcgttcataatatggatattcaatatgcacagtcgggagtattcactccatgtgattttgcttttccaactgatggaaaacgggcggaggccactccgaatacggaaatgattctggtttcggatgtcgatctggatttattgaatgcactccatacttacggtagtgtgcgcaatctgaaggatcgtagaaatgatgtatatgaagtgcggctgaagaagtaaaaggagactgtttagttggtttcaaaccaagaccccgttggtttaaaaccaacgaggctttccttttaaaccaagagggctttggtttaaaaccaataaaaggaatgttttttaaccctttccggaagtaccgctttcgaggatgctgacgatagaaaacagtgtgaagcaaatagctcccaatcctactaaaacccgtgccggaataaaataatcagcgtttacggtagcaagctcgaatacaaaggcagccagaaacaggcatgttaatgctgtcagtaccggaatcatagggattcggttggccagcttgaactcccgtctccatatcttagcgagcagaatcaccttgctggaaatactgtaacataccagaccaaggccaagcatgatgtatccggtagtgccgtttgcacttcccgagtcggcaaggatgacgaatatgccccatacaaaagagatcgatcccatgagtaaaaccagtttcggccatttgttacgttctctttccgaatagtcgttccggacctgacgggctatggttgctaccaatgcaatcagactggtacaaatacatgcgagccctaccatcacatgccctgctacaaaataagcaggatgggaatgactgttgcttaacaggatgaacgcccatatccatgcgatacaggaaatgacgattgcgagaaagatcattgcccgtctttggccaatagagaacgctccctccggcacttcatttccggtagctttggcattggccggaattaaagaaaatcgggtggaagaggtagcggcggtagctacacaggctgtgataaatcctacaccggttatgacatgccctgcgacgaaggctgaagtagtggtagcactattgaaaatgcatatacctccgataattgttatgatagctgccagatagcccacaacaggtaaaacgtattttgtcgcttcattataggtatgtatgatttgccggattattgtggctgccgtacagaacagcgcaatgcatatcatacctagtgaaaatacaacaggacctgccaccagacggtttcccgcatcaccataaccgtaaatgaatgctccgtatccgaagcaaaagaccgccatcgccaaagggattgctctgaataaaatactaataccgtaattcataacttaagtgctttttattttcccactaaaacaaggagatatcggttttgtttaatgcaacatccatttataaacgataacttcacatgattccaattaaaagtccttgctttttgctcaactaaacaaatgtttttgtaaatttgcacccttaaaaatggggatacccctcaaattgtaaattgtaaatagtaaaatcgtagatatagctatgggtaagagatttactgaatattcgcagtttgacctttcacaggtgaacaaagatgtgttgaagaagtgggacgaaaaccaggttttcgccaagagtatgacagaacgtgatggctgcccttcgtttgtgtttttcgaaggacctccctcggctaatggtatgccgggtattcaccatgtaatggctcgtaccattaaggacattttctgtcgttacaaaacaatgaaaggttaccaggtaaagcgtaaagccggatgggatacccacggactgcctgtggaactaagtgtagaaaaagcattaggtatcacaaaagaggatattggtaagaaaatctctgtagcagattataacgctgcttgccgtaaggacgtgatgaaatataccaaggaatgggaagacctgactcatcagatggggtattgggtggatatgaagcatccttatatcacatatgacaatcgttatatcgaaacattgtggtggctgctgaagcaactgcataagaaaggtttgctgtataaaggatacacaatccaaccatattctccggctgccggaacaggactgagttctcatgaactgaaccagccgggctgttatcgtgacgtaaaggatacgaccgctgttgcccagtttaagatgaaaaatccgaaaccggaaatggcggagtggggaactccttacttccttgcttggacaacaactccctggacattgccttcaaacacagcgctttgtgtaggaccaaagattgattatgttgcagttcagacatataatgcttatacaggagaacctattacagttgttctggctaaggctttattaaatactcatttcaatccgaaagctgctgatctgaaactggaagattataaggcaggagataagctcgtaccattcaaagtaatcgccgaatacaaaggtgctgaccttattggtatggaatatgagcaactgattccctgggtgaaaccggttgaagtatcggaagacggtagctggaaagtaagtgataaaggcttccgtgttatcccgggtgattatgtaacgacagaagacggtacaggtatcgttcatattgcaccgacatttggtgcggatgatgcgaacgtggctcgtgcggcaggtataccatcacttttcatgattaacaagaagggcgaaacccgtccgatggtagaccttaccggtaagttctatatactggacgaactggatgaaaacttcgtgaaagaatgtgtggatgtagacaaatacaaagaatatcagggtgcatgggtaaagaatgcctatgatccgcagtttatggtagacggcaaatatgatgagaaagcagcacaggctgccgaatctttggacgtcgctctttgtatgatgatgaaagcaaacaatcaggctttcaaaatcgaaaagcatgtacacaactaccctcattgctggcgtacagacaagccggtgctttattatccgttggatagctggtttatccgctctacagcctgcaaggaacgtatgatggagctgaacaagacgatcaactggaaaccggagtctaccggaacgggtcgtttcggcaaatggctggaaaatctgaatgactggaacttaagccgttcccgttattggggtactccactgcctatctggcgtacagaagatggaacgagcgaaatatgtatcgaatctgtagaagaactttataatgaaatcgaaaaatcggtagctgccggatttatgaaatctaatccgtacaaggataaaggttttgtacctggtgaatataccgaagaaaattatgataagatagaccttcatcgtccgtatgtagacgatgtcattctggtatcggaagacggccagccgatgaagcgtgaatctgacctgattgatgtctggtttgattccggcgctatgccttatgcgcagattcattatccgttcgagaataaagacattctggataaccgtgaagtatatccggctgactttatcgcggaaggtgtggatcagacacgcggatggttctttacactgcatgctatcgctactatggtatttgatagtgtgtcgtataaagccgtgatctctaatggactggtacttgacaagaacggtaataagatgtccaagcgtcttaacaatgctgtcgatccgtttactacgattgagaagtatggttctgatccgttgcgttggtacatgattactaactcatctccatgggataatttgaaattcgacgttgaaggaatagaagaagttcgccgtaagttcttcggtaccttatataatacatattcgttctttgcgctgtatgccaatgtagacggattcgaatataaagaagcagatgttccgatggcagaacgtccggaaattgaccgttggattttgtcagtattgaacaccttaatcaaggaagtagatacttgctataatgaatatgaaccgactaaggcaggacgtttgatctccgactttgtcaatgacaatctgtctaactggtatgttcgtctgaaccgtaaacgtttctggggcggtgaatttactcaggataaactgtctgcttatcagacattgtatacttgtcttgaaacagttgcgaagctgatggcgcctatttctccgttctatgccgatcgtctgtatacggatttgatcactgctacaggacgtgataatgtggtttctattcatttggctgaattcccgaagtatcaggaagaaatgatagacaaggaactggaagcccgtatgcaaatggcacaggacgtaacttctatggtattggcattgcgtcgtaaagtgaacatcaaagttcgccagccgctgcagtgtatcatgattccagtggcggatgaagagcagaaagctcacatcgaagttgtgaaagcattgatcatgaacgaggtgaatgtaaaagatatcaagtttgtggatggtgctgccggcgtattggtgaagaaggtgaaatgtgactttaagaagttaggcccgaaattcggcaaacagatgaaggcagtggctgctgctgtagcggaaatgtctcaggaagcgatagctgaactcgaaaagaacggaaagtatacattgaatctggatggagcggaagctgtgatcgaagctgcggatgtcgaaatcttcagcgaagacattccgggatggctggttgccaatgaaggtaaactgactgttgctcttgaagttactgttaccgaagaactgcgtcgtgagggtatagcccgcgaattggtgaatcgtattcaaaatatacgtaagtccagcggtttcgagattacggacaaaataaagatcacaatctccaaaaatacgcaaacagatgatgcggtgaacgaatataatacttatatttgtaaccaggttttaggaacatcccttgatttggcagatgaagtgaaagacggcacagaacttaattttgacgatttctcattgtttgtcaatgtgataaaagactaatactaatattgattaaccttttaaactagtaaagttatggcagaaaagactagatattcggatgcggaactcgaggaattccgtgccattattatggagaagttggagttggctcaacgtgattacgatcagttgaagatgagcttgatgggattggatggtaatgataccgacgatacatctcctacttataaagtgttggaagaaggagctaatacgctttcaaaggaagaaacgacacgtctggcacagcgccagttgaagtttatccaaggattgcaggctgctttggtacgtattgagaataaaacgtatggcatttgccgtgagactggaaagttgattccggcagaacgcttgcgtgctgttcctcatgctacactcagcatcgaggctaagaacagtggtaaaaaataatagatagctacaagctacggatgacgagctacaagtagctgcgcaatgtttacgcacggcaacttgtagctcgttatgtttaatttatgatgaacaaatgaagaaactattcacgaagggtagaattgccctgcttgttatcttttccgtactgattattgaccagatcattaaaatctggattaagactcacatgtattggcatgaaagcatacgtgtgacggactggttttatatctatttcaccgaaaacaacggtatggctttcggtatggaaatatttggaaagttgttcctgaccactttccgtattgtggcagtagggctgataggctactatctttataagattataaaaaaaggcttcaagaccggatatatcgtctgtgtggccctcatcctgaccggagctttggggaatattatagacagtgtattctatggcgtctttttcaatgaaagtactcattcacagattgccagttttatgcccgaaggcggtggatattctacctggttctatggcaaagtagtggatatgttctatttcccgattatcgacacaaactggcccacatggatgcctttcgtaggtggagaacattttatattcttcagtccgatctttaactttgcagatgctgctatcagttgcggtatcattgctttgctacttttctatagcaagtatctgaatgaatcttaccattcactggataaaaataaaaaggaaagcttaggtcatgaagagtaggtttcggtttcatctgtgttgtgtttgcatgttggtgcttgcgatagcaggctgtaaagtcaaaagacctgacgatgtaatctcagaatcgaagatggagaatttgttgtatgattatcatctggcaaagtctatgggagataatctgccttatagtgagaattataagaaggctttgtatctcgatgccgttttcaaaaaatatggtacgacagaagccgtattcgattcgtctttggtgtggtacacacgcaacacggaggtattatcgaaaatttatgaaaaggtgagcaaacgcctgaaagctcagcagaatgaaattaatcatctgatagctttgcgtgacaataaaccgaagatgtcggaaccgggtgatagtattgatgtctggccctggaaacgtctgatacgtctgacgggtgagatgatgaatgaccagtatgtctttgtattacctgccgatactaattataaagatcgtgatacattagtttgggaagtatgttatcatttcctcgaaccgatgcttgccgattctttgagagctgttacgatggccatgcaggttatttatgaaaaggatacattaaatcgcctggaaacaatcactgatccgggtgttcaccagttacgtttgtatgcagatacattgggtgtgatgaaggaaataaaaggttttatctattacccgggagtacagggagagaaagtcggtgcattactggctgatcgtttttctttaacccgttatcattgctcagactcgctttctgtagccgaacgtgattcgattaatcagctggaagctctgaagacagattctttaaagaaagtatccgatcaaaaagataacaagatttcgaaagactctttgcgaaaagtcgatgatctgaaggataatcaacgtatatcaccggaagaaatgaatcgccgtcgtacggtgactcctgaaaagaagccggaacagattgaagtagagcaacatatccagcaggagaagattgagcaaagaagggaacggcaattgaatcagcgtagaaatcagcaaagacgtcagtcaccttcccgttaatattatgaaacgctttgccgctcattatttgcttctgcctgatgtaggctttatcagacaacaagtagtagagattgctgatgaaggatatgtacgggatgtttttccgttgacagaagaaatagagtctgttgaatggatgcccgggctgatcgcattactccccgtgaatgaaataaaaaacactgagatgttcagcaaaaacatcccagtgtttcaatttaattttcctatagtttcggatcaaacttcccaatgttttaaagaggctcttgcgacgtctgaaaagaggggagaagtactgtttccttatttattttatccttttgattttacttccatgcagcctgtcgccggaactcggcacagattactgcggtagcgatagccacgttgagagattccgaggtttcctttccttgtggataattggggatataaagtttccgattgatgagtgcttccacttcttttcctattccgttgccttcattccccattacaatcagtccgttggtggataatggttgttcgtacatgttttctccatccaaaaatgttccgaatacgggagtatcaccgagtgaatgaataaattcgggaagagaggtataataaaccttaacacgggcaattcctcccatagtggcttgtatggtcttgggattgtatacgtctaccgtattctgagagcagataatatgttcgataccgaaccagtccgctagtcggataatcgtacccaggtttcccgggtcctgaatgtcatccagcgccaggcaaagagactgtcgtacgaaatccggacttaacgtatattgcggttgctcgaaaacagcaagtacttgctgtggtgttttcagcaggctggcacgtgatagttcttcttgagagacttctgcaatttcatttgcttgaatgtcgggatgcgcttgtaaccacgaagaagttgctgctagaaaacggcaagggaaatgtcctagtaaatcgcctgttaatttaggaccttcggctaggaatacttgttcttctttacgtgttttctttagttccagcgaatggatatactttattttatttttgcttagcattattcttttacttctttatttaccgcaaagctataaatatatttttaataaatcggctgttgaacaagttttttgaaaataattctttctcatattaacaatatttgtatgaataaaaattgattatctacttaattttagtagatttgcttaaaattagtagtttgatattcagtataaaagataacgatatggaaagattgacacaacaagaggaagaagtgatgatttacttttggaaaatgggaccgagttttatccgggagattgtgaatgaaatgccggaaccaaaaccgccatatacaagtgttgcttctgtagtccgtaatctggagaaaaagaaattcttgtctcctttcaagttagggaattctattcagtatcatgtgctggtgaaagaaagcgactataagcgtagctttatgaatggagtagtaagtaactattttacaggttcgtacaaagaaatggtttccttttttgtccgcgatcgtaaaatcagcaagaaagaactcgaggatttaatcaatattattgaggatgaagaatcataaatcaagataggcatggaatcttttgcaatctatttgattaaagtaaatgtagctttgattgtattatatgcattctataagctctctttcagcaaggatacatttttcaggctgagacggatcatgttgctgctgatatgtgtgacttcgctgatttatccattgattgatttttcaggctggacggacgagtatgcaataggagaaacgattactaccgtttacaataaactgttaccggaagtgctggttactacagctgtacccgttgctacaactgaagttgaagggacaacctggcaggccggtacttggttatggattatttatggattgggaataggtatgttgttactgcgtaatcttttagaagttagtaaaatacatcactctttagcctgctctcagcgctattctctgaaaggtgtacctgtttatcagtcggaagacgtaggggagccctgttccttctttcactggatattcataaatccgatgcaatattcggataaggaaattaatgagatattgatacatgaacaaactcatgtccgtgaatttcattcattggatataatactggctcaactgattatattattatgttggtttaatccgttttcctggttgatacgcagtgaaatacgtatgaatcatgagtatctggcggacaagcaagtagtgacgtccggctatgacaagaaatcgtatcaatatcatttgttgggaattaaacatacttcattggctgcagcaaacttctataacaactttagtgtattacccttaaaaaaacgaattaaaatgctaaacagaaaaagaactcataacatcatggtaggtaagtatctgatgtttataccagtggccgcattattgctgttattcagtaattgtgctaataagaaagcggataaagtccagtctgataccgaaaaagcagataccatagagttgactgctgaaccggagaaaacagcagagcctcaagttgatataacgatcacggagacgaagggtgattctatttattcagtagtggaaacgatgccggatttccccggaggacagaaagaactactgagttttttgagtcgcaatatcaagtatccgacgaaggcgatagaaaataaaattcagggtcgcgttattgtacagtttgtggttaacaaagatggtagtatttctggtgcgaaaatagtacgtagtgttgatccggatttggataaagaagctcttcgagtcataaattcgatgccccaatggaagccgggaatgcaaaaaggggagcctgtatctgtgaagtatacagttcctattgtattcagaaatcaacaaaattaggaatcttattcgccacgatttatagaagtaattgcaaggatacatagtcagtaatatataggtattagcaaagcatactttgcaaatttctataattcgtggtgaaaagaacttttgtcgcattaattattgttttgataatttccccgaacgaaaaatatgctctatctttgtccctatatatttgcttccgcttttatagagatactgtatgaggaaaggatttctttacttatttacttttgccgttatcattctgtcgctcgcttcgtgcactgccactaagtatgtgccggatggctcttatctgctggatgaagtcaagattcatacagatcagaaaaatgtccgtccttcttccttacgaatgtatgtgcgacagaaccctaatgccaaatggttcagtttaatcaaaacacagctttatgtttacaacctttcaggacgagactctactaaatggggaaataagttcctgagaagaatcggggatgctcctgtaatctatagtgagactgaagcgcagcgctcgcaggatgaaattacaaaggcaatgcgtaatatgggctatatggcggccacagtgaagcgttcgactaaaataaagaagaaaaagatcaagctgtattatgaggtgacagccggcgatccttatattgtcaattcattaaaatatgatattcgtgatcctaagattgctgattttctgaagcaggattccgccaaaagtctgctgaaagaaggaatgatatttgatgtgaacgtgctggatgccgagcgtcagcgaattactgacaagttgcttcggaatggttattataagttcaataaggattatgtcggttatacggcagatacggttcggggtacttatcaggtagacttgaccctgcatttgcacgcctacagagcgcatgtgagcgattcggtgaaagcacaccaacaatattggataaataagattaactttattacggattatgatgtcctgcaatcttctgcgctgaacagtatggatatcaatgattctcttcattttaaagggtaccctatttattataaagataaactctatttacgtccgaagatgcttactgataatcttcgctttgctccgggggatttgttcgatgaacaggatgtgcagcagacttattccaatttcggacgtctgtccgccttgaaatataccaatatccgttttcttgaaaatcaggtaggggatacggcgaagcttgactgctatgtgatgttgaccaagagtaaacacaagtcggtagcttttgaattggaaggaaccaattcagccggtgatttgggagcagcagcttccgtctcttttcaaaacaggaatctctttcgcggttcggagacttttatgatcaagtttcgtggtgcttatgaagtgatttccggacttcaggcaggctattctaacaataattatacggaatacggggtggagacaagtatcaactttcctaatttcctgtttccttttctctcttcggactataaacggaagattagggccactacagagttcggattacagtataattatcagatgcgtcccgaatttctacgtaccatggcatcggcttcatggagctataagtggactcaacgccagaaaatacaacatcgtatcgatttgattaatatcggtttcctttatttgccgagaatttcggagaggtttaaggaggattttattaacaaagggcagagccatattcttcagtataattatcaggaccgtttgattattaatatgggatatagctatcattacaatagtattggtggtgccatcattaataatacaattgcttccaattcatattccatccgttttaatttcgaatcagcgggaaatatcatgtatgctttatccaaagcaacgaatatccgtaagaataatgatggggaatatgctattctgggcattccatatgcacaatatgtgaaaggagaatttgacttttctaagaatataaggatagatcatcgtaactcgtttgcgtttcatataggtatgggcattgctgttccttacgggaatgcgaagactatcccgtttgagaaacaatacttttccggtggtgccaacagtgttcgcgggtggacggtacgtgacttggggccgggttcttttgtgagagatgaaaataccaatttactggatcagtccggtgatatcaagctggatgccagtattgaatatcgaagcaaattattctggaagtttcaaggagccatctttgtggacgccggtaatatatggaccattcgtgattatgacaatcagccgggaggagtctttaaattcgataaattctataagcaaatagcggtagcgtacggattagggcttcgtctggatctggatttcttcattcttcgttttgacggaggtatgaaggcgcttaatcctgtttatgaaaaggggaaagatcgttatccgattatccatcctaagttcagtcgtgattttgctttccattttgcggtaggatatcctttctgatcaatcattgctaataaaaaaggagatgaaactgattatacggtttcatctcctttttgttttattgtatatgcttttaacgagcggcaaacatcaggttgctcatagtagcctgacgggcagccatcataccttgagcgtccaatgtaacgttcattttttcgccgtttgttaagaacaggtcagcagtaccgtcgttattcatctttagcaactcagagctttcgccgtttgcaactacattccaggtattagcttctttgttgtagatcaaatccatagaagctgtttcgccttccttcgtgattgaatagccattttcaagcgttttaaccatatagttaccgttttctccttttaccttcttcacgtcgcccacattagccatcgggttggaaccactccagaattcgatagagttgattactaaggcatcagcaaggtatgctacgccataaaccggaacaatgttgaaagctaaaaatacaagttcatttacaaatttgtttccgactccttgattccaggaacttaaacggttgaataagccaaatgatccaacacaggagctgaataataagctacaactaagtacaaccgctactaatgtcagtttgctttttttcatgtttactttactttttgattaataaaatgttgataaattctctttttaatagatgcaaatataacatttttaaattaatcaaggttattatttcttgtttttatatcatttacgtttgttgtgtgccaacttgtttccaatgaaatgatctatggaaaatttaccgggtccggcaatgtacattaatacaaatactactaagtagatgaatgccaattcttttactgcaaatacgtcattagcatggatgacaaaaaaggcaactatcatagtaaaaatcatcgggatcattgccaagcggtacagaaagccgaagatgaagcccattgaacataccaactcaccaaagatcgctaaaccgagggatatggaactgcccagcccgatcggatcaggaaaagccgtggataactcctggaaattgctccatttctgtataccgtggttcattaataatattccgaaaatgatgcggactgccaataaaaacaaggatacttttgttgtatttggctttgtggggaataaaaaattataaatcataagtcgttctttttataagtttgctttttatttatataaacataaaaaatattgaaattgttctctgaaaacgataaaacatagaaacaaaaaaagataccggaaataaaatgactgatcagccgctttgtttccggtatcttttgataaggacaggattttcttgtctattctttgtttagaatataatgttcggcaagtgctcccgttatttcttgtttgtcatcgtttaacagacgaactttgttttcttctactttataataagatatttctccaccttcttcttttaaagtcaggatattaccttccagtgtataagttcctttttcatcaaatgaactgtcccggtcgatgtatacagagtgaagagtaaacgttttgtcaggatttaatgtcagagttgtttcaatgcccggacagtcggcagcaggaaagacacctttataggtcccttcataatcaagcgatgtttcggcattatgtatatcagccacttgggttgctgtactgtccgcacttgtactattgtttgttttcgcactgtttccgcatgctgccagaagaaagcaggaacatgccagaatgataacttttttcatgatcgttacttttaatagtttatctaattaagtttatagttcgtaaaggtataaataataagttgaatccgggcaataaaaagaaccgaacaacttaatttatgaatttataaacggtcaatactatcagagtacttagataaactttataattgtatgttaacatataacttaccatttctttgagaagagttcaagcaactgacttttcttcaatggtttggcaagaaattcattgcatcctgcgtcaagagcgctgattctgtcagcatcaaaagcattggctgtaagtgcaataataggtatcctattattaaactcacggattttgcgggttgcttccagtcctcccatgacaggcattttcatatccatgagaacaagatcgaactcttcctcacgtactttatttactgcttccgctccattttgaacatgggttagatggtagcttttgagaatatgttgcactaacgaatagttactttcattatcttcggcaattaatatcttcagttccttcttgtcgatttcgttcaaagaaagctggtgttgcaatggcagtgaaatagttgggttatgttctttctgagtgctgatttcacaaggaatccatgcccagaaagtcgatccaataccgggagtggaagtaaatccgacttctcctccggctccttcaatgatagctcttgagatagccagtccgagtccggtgccctgggcaaactcattgagcttctggaaacgtccaaacactcgttcctgtaattcttccgggataccgactccggaatcttccacatagatccggattccttctctttcgatgctgtatcccatttttatatatccggatttggtgcatttgacagcgtttgtaagatagttcatccatacttgcttgagccggcttctatccaggaaaatccaacagtccggaccggaattgtccatttgaaactcaacatccggattggttatctttggctggatcatggtataaagctcgttgcatactttggctaaattgaatgtttctcttttgcgttcaagaattcccgattcaatcttggaaaggtcgaggatatcattaatcaatcgcaataacaactcattattggattggatgatgctcatgtattcttctttttctgccggatcttcagaatataccatcagttcggagaagccgacgatcgcgttcagaggcgtacgtatttcgtgactcatattggcaaggaaagccgatttcagacggtcggaaagttcggctttgtctttcagttcctttagttgctgtgccattttctcccatttcgtattgttgactttaataccggtgtagcgaattacattgcctttcttgtctctttccactggtatgccggtaacaatgagagtctgccattctttgtcccatttagttttggatcggaatttgaagttgagatccttagttgttcctccaatcatataattaatatggttgcggaccagctcgatgtcttccgggtgggtgacatgcagatagtcttcaggtgtgattacattttcagaatggaagtcattcacggggtcattaaatgctttgaattgtttgctttttacttcaaaatcccagtaagacatgcctacagttttgaaggtgagctgcatcttgtagtttctttcttcaagttcctcattcagttgatgaagtttggagatattttgtctgaatccggtatatcgtacgttgttgccatattcgtctttctcgaatggaacacctatgatattacaatattgccaggattcatcatacttcgtttgcatacgacaagtgaagttaatggtgagttccttgcctgatagcatagactgtatggcgtcataggatgaagaacggtcttcaggatgaataacatccatgtatcgttggatgctcaccagtttatcactggcataatcattgatcgggtcattataggcttcgaactcttgagtccgtacatcgaaatcccaatgaatgatattgctgactttcatggccagttcacgcttggcgattaattcctgcgtcttctttaccatttgcatcctttccgttatatccagttgggttcctataatcagcaatttcccaaaatgttcgaaagataaccgcatcatgctttcataatagcggtattgcttttcttcttcattatagaaacgtaaggtgatgtttccttgcagaatttctttgttggtcagttgtgataaaagttgtattaaaggttcatgatcttgtggatgcagtatatttagaatctgatctaatgtcgtgttttttttagctataggatctccatgtaatggattgaatgtttttttatacacgtcatatacccaagacgacatagaggccgcttccattgccatttccagattctttttgctttcatccgtacggaattcagcttcttttatggcagtcacatcgttggaaagcaatatatgcccgatgatttctccctccttgcttcgcaggggaacgacctttgcttcataaatgatcgtgttcttattttgggtagagaagtatgcgttgtcttttatccggtcaaagtcgtattcgaattccagaacaatatcttcgcctctctgaatgcgatttttgagagtttcgtccacataaggactattaaaaagattgacgatattaaccacagtcgttttatcagtgactccatacatctgcaatgcatgttcattgatactgcgcaagataccatttgtatcatagatctcaatactcattggcagacaagcatagatactttctgcaaacagaagttgatcttttgttaaagggaatgtttctggtgctgaagatgacattacattttgggtaggttctgtttcacttgggttcatttgtcctttgtttttgtctatgtatgatgctctgatttgtttgctattgattaatttatacaacttcttgattgctgcaagaagctatatgctcacaaacatacaataaaaatatggaataaagaaattaacactaataaaagtgaatgacaactttgcatttgattaatgccaggaaagcatgaaaggcatcttttcactctcaagaaatctatattatataaggtgaaatactaaaagtgcttgtccgggtctgcatattctcgtttttatctttatctttgtaggaaaatataaaaatatggcacaacatacttatgatgaagaatcggtccaggagctgttgggctgggcgaagaagatgattgaaacaaagaattacccgacagaaaagtatcaggttaatgcgtgtacttcaatcattgatggtaaactttatctggagtctttaatttcgatgatttccaaaaactgggaaaatccgacttttcatcctaccattgagcaactgtgggaatatagggaaaagtgggaaggtcaaaaggaataatctaagtttcagatttccccagaaaatgcataatgcactctgaagcgatgtgcccggagtgcattatgcatttttattaatggatgtaagtctgatctttcgcgtcggagattaaaacggcaaccattttctttttttcttctgactggtattttcttctctttgctggctgtatatatcggcaaatgtctttttctcttttatcatttcatagataattccccagtcgggaataccgccgacattccggtcgtctataaacagatcggctttcagttttcgggaaaagccctgatgatctctttcttcttccggatagtctttattggctgcataaaactccagtcctctggctctgcaccattctatggcttcgtccagaagttctccctcgcgtacactccacaagattaaacggtgcttttcttgttgtaacaatttcagcgtttcaactgcaaatggaatttcttcaccaatacgtggataacgatgctctacaatcgttccgtcaaaatcaacagctatagtcattatgatatatttagaatacgtaatttaggacaaagatacggactgtaagctaaaaaaacgtatatttgcgctgaattaacattttaataaaaaaacagagattacatgaacaattcccctcagcgtgccgccaaaggttttacaagagccttttgggtgagtaacacagtcgaactgtttgaacgtatggcatattatgctgtttttatcgttctcactatttatttatccagtattttaggttttaatgatttcgaagcaagtatgatttccggtcttttctccggaggattatatttgcttcctatattttcgggtgcttatgcagataagataggtttccggaagtcgatgattattgccttttctttattatctatcggttatttggggctgggcgtattccctacattgctcgaagcggcagggttggtgagttacggtgcgactacccggtttaatggtttgccggacagttcttcccggtggattatcgttcctatcctgtttatccttatgataggaggttcttttatcaagtctattatttccgcatctgtagctaaggagacaacggaagcgacccgcgcccgtggttattctattttttatatgatggtcaatgtcggtgcttttacgggtaagacgattatcgaccctttgagaaatgtgatcggcgaacaagcttatatttacattaactatttctccggggcgatgacggtaattgccttgctggcagtgattctgctatataaatcgactcatacggcaggtgaaggaaaaagtctgcgtgagatagggcagggctttatgcggattatgactaactggcgtttattgattcttattttaatcgtaacaggcttctggatggtacaacagcaactttatgccactatgcctaagtacgtcatccgtctcgcaggcgaaacagccaaaccgggctggattgccaacgttaacccttttgtggtggtatgttgtgtcagctttatcactcgtttgatggcaaagcgcagtgcgattacttcgatgaatgtggggatgttcctgattccggtttctgcattgctgatggcatgtggaaacatattgggaaatgatattatctcaggaatgagcaatattactctgatgatggtggccggtattgttgtacaggcacttgccgaatgtttcatttcgccgcggtatctggagtatttctctctgcaggctcctaagggagaggaaggtatgtatttaggattcagtcatctgcactcattcctttcttctatattcggtttcgggctggctggtattctgttgacaaaatattgtccggaccctgccttgtttgaaactcgtgcggcatgggaggccgccagtgcgaatgcgcattatatctggtattatttcgctgctatcgggctgattgccgccatagctttgctattattcgcaaaaatcaccgaatccatcgacaaaaagaagaaatcttctcggtagttatcttcttttttatgtatatttgccgtcactttgctgtaaaagttgacggcattttgcattttaataaagaaagataaaacatgaaagtaagatttataagcctggcgagtggcagcagtgggaactgctattatctgggtactgatacctatggaatactgatagatgccggtatcggcatccgtaccatcaagaaaacactgaaagatttcaatattctgatggaaagtatacgtgccgtacttgtaacgcacgatcatgcggatcacatcaaggccgtagggcatttgggggaaaagatgaatatacctgtttacaccacggctcgtattcatgagggaattaatcgcagctattgtatgacggaaaagctcagcacatcggttcgttatcttgaaaagcaagtgcctatgatgctcgaagatttccgtatcgaatcttttgaagttcctcatgacgggacggataatgtaggatattgtatagaaatagacggcaaagttttttctttcttaaccgacttaggcgaaatcactccgacggcagcagattatatcagcaaggcaaactatctgattctggaagcgaactatgacgaagaaatgcttaaaatgggtccttatccccaatatctgaaggaacggatcatgagcaggaccggacacatgagcaattctgctactgctgaattcctggcagaaaatatcaccgagcacctgcgttatatctggttgtgtcatctgagcaaagacaataatcatccggagctggcatataaaacagtagaatggaaattaaagaacaaaggtgtaattgtaggtaaagatgtgcaactacttgctttaaagcgaaatacgccttctgagctttatgtgttcgaataataacgaaaaaaagatagtaaaaaagctgcattattgtttggtcaaatgaaataaaagacctacttttgcaaccgcaaacgaggaaataagcactcttagctcagttggtagagcaactgactcttaatcagtgggtccagggttcgaatccctgagggtgtacaaatccaaagttgcaatataaaaaaaatgttgcactcttagctcagttggtagagcaactgactcttaatcagtgggtccagggttcgaatccctgagggtgtacaaaggatgaagaagtaacttagttacttctttttttgtttatatgaactttcttgtaaggaggcagtccgaaagatgcttgccgatttaatcagacctgcctggtttaatagtctatgcttcgttgattaatcccttttgtatgctaagttaatgtcttctgaaagcaataagaacaagtttcaggtacatgatcccatcggttcatgtacgtggactgatgggatcacgtgcgtagtccgaatgcttcacgtacgtgaaacgagagcatatatcctgcaaaatgtattaatcaaggcttgttgatgtattaggtatactggctttaactattatacatgccatctaaaatgtcttaggaagccaaagaagcatcgtttaatgctttagcaaataaaattttgttgttggctcaagggagaaataatggattaataggaattatagaaggtaaaaagggggtaaaatacaattttcgggtcgaaaatacagttctctgtgataaaaagaaaaagaagttagttcctgtttaaatgttggtaatcagtgtagtaggagatatgggtgataatagaaggtgataaatgaattcatataaattctattatcaccttattatcaccgcttattgtcaccactattttattgattactaactctttaactataaaaggtgacaagtgacaatagaatcgtatatgaaactacagggagaggagcgttagttttaaaaaaaataccgctgtggagcatcgggccccgacagcggtattactatttagtaattcttgttttagaatttgaagaagttcttggcattgttgtagctgatgtcttcgatcatctgatttacgcgatccatttcagataccggaatttctccgttctccacatcacgtcctaccaaattacataatgtacggcggaagtattcgtgacgtggataagaaaggaatgaacgggagtctgtcaacatacctacgaaacggctcaaaagtccaagtactgataaagcgttcatttgtttctccataccatccttctggtcgaggaaccaccatccggaaccgaactgaatcttgccggctattgagccatcctggaagttgcccagcatagtggcaatcacttcattggcgcaaggattcaggttataaaggattgtcttggtcaacttgccgttaacgttcaggcggtcgaggaatttagacattgccttggctgttgtaaattcgccgatagagtcgaagcctgtatcgggacctagcaatttgaacatcttcgtattgttgttacggatagcaccgtagtggaactgctgagtccatcctttttcccagtccatttcgccgaagattaccaacatagcagacttgaatttcagaatttcttctttagtcaattcagctccgccgtataccttattaaatatagctttgatttctgcgtcggtatagtcttctgcatagaattcttcgataccgtggtcggacaggcggcaaccctgttctgcgaagaagtcatgacgtttgcggagagccgcaatcatatcgtcgaaattagagattgtcacaccgcttactgcagacagtttttctacataagcgcggaagtcggcaggaacttctaccgccattgctttgtccgggcgccaggtaggcaacattttgatttcaaaaccgctttcgcgtgtctggatatgatattccagagaatcaatcggatcgtccgtagtacatactacttctacgtggtaacgacgcatcattccgcgagctgagtattccggctgagccagcttctcgttacactcgtcgtaaatctcgcgtgcagtcttcgggcttaaaatcttgtcgatgccgaaagcagtcttcaattccaggtgtgtccaatgatacaacggattgcggaaggtataaggaacggtttcagcccatttttcgaacttttcccagtctgtggtatcttttcctgtacaatagcgttcgtctacgccatttgtacgcattgcacgccatttgtaatggtcgccacccaaccagatttcagtcagtgatttaaacttgtagtcgtcagctaccatttgggggattaaatgacagtggtagtcaataatcggcattttagccgcatgctcgtgatacaacttttgtgcagtttctgtctgcagcaagaagttttcatccatgaagttcttcattgttactgtgtttttagtatataaaattattactttctgcatttatacctatatagtattgattttaaagctaataggtgtaaatctttgttttagttttattaaccgttatcgaacacaaaaatagaaaatttacttggagtaacaaaataattcgtatatttgcagcgattatttataatatttaagttttagcactatggaggaccagaactataccatcaaagacattgcccgtatggcgggtgtttccgccggaacggttgacagagtgctgcacaatcgcggcgacgtatctcctcaaagcaaggctaaagtacaaaaggtattggatgaaattcactaccagcctaatgtatttgctatcggactggctgccaagaagaaatattctttcgtttgtctgataccttattatatagagcacgactactggcattcggtagtgggaggcatcgagcgggcacgtcaggaattgcgtcctttcaatgtgagtgtggattatctttgctatcatcaggggaacaaggaaagttatctggaagtgtgtcgcagagttgaagaaagcaatgtcgacgctgtactgatcgctccgaacttcagaaatgagacattggctttgacagactatctgcaagctaaaaaaatagcttatgcattcattgacttcaatatggaggaagcgaacgcactgacctatatcggacaggactcttataaaagcggatacattgccgccaaaatattaatgcgcaactatcaggccggcgaggggcaggagctggttttgttcttgagcaataataagaacagtccggcagaaatacagatgcaacggcgtttggcaggatttatgagctttatcaccgaagagtatgaagagttggtgattcatgaagtggtactgaacaagtctaatcaggaaaataatcaaaagacattggatgaatttttccggctgcatccgaaagctacgttgggtgtcgtattcaattccagagtttatcagctgggcgaatatctccgtagtgcgggacgtagcatgaaggggctgataggatatgaccttctgaaagcaaacgtggaattgctgaaatccggtgatgtgcattatctgatcggacaacgcccggggctgcagggatattgtggcgtaaaagctctttgcgaccacgtcgttttcaagaaatccgttgaaccggtaaagtacatgcccatcgacattatgataaaggaaaatattgatttttatttcgaatttgtataatatcaactttataaattacaactaacatgaaagcattaaacaaagaaacagctcctaaagtacaacgtccggagcgcattatccaatttggcgaaggtaactttttacgtgcatttgtagattggattatttacaacatgaaccagaagactgacttcaacagcagtgtggtagtggttcaaccgattgataaaggtatggtcgatatgctgaatgcacaagatgatttgtaccatgtcaaccttcaaggattggataaaggagaagtggttaacagcttgacaatgattgatgtaatcagtcgcgcattgaatccttatacgcagaatgacgagtttatgaagctggctgaacaaccggaaatgcgctttgttatctcgaacactacagaagccggaatcgcctttgatccgacttgcaaactggaagatgctcccgcttcatcttatccgggcaagctgactcaattgctgtatcatcgttttaaaacattcaacggtgacaagacgaaaggtctgatcattttcccttgcgaactgatcttcctgaatggccacaagctgaaagaaacgatttatcagtatatcgacctgtggaatcttggcaatgaattcaagacttggtttgaggaagcttgcggagtatatgcgacattggtagaccgtatcgttccgggatttcctcgcaaggatattgctgctatcaaggaaaagatacagtacgatgataaccttgttgtgcaggctgaaatcttccacctgtgggtaattgaagctccgcaggaagtggcaaaagaattcccggctgataaggcagggctgaatgtattgtttgttccgtcggaagctccttatcacgaacgcaaagtaactttgctcaatggtcctcacacggttctttctccggtagcatacttgtcgggtgtgaatatcgtgcgtgatgcttgccaacatgaggtaatcggcaagtatattcataaagtgatgtttgatgaattgatggagacattgaatcttccgaaagaggaactgaagaagtttgcagaggatgtattggaacgtttcaacaatccattcgtcgatcatgcggtaacaagcattatgcttaactcattcccgaaatatgaaactcgtgatcttccgggattgaagacttatctggaacgtaaaggggaactgccgaaaggactggtactcggattggctgctattatcacttattataaaggtggtgtacgtgcagacggggctgaaattgtaccgaacgatgctcctgaaatcatgaacttgctgaaagagctttgggctaccggttgcacgaagaaggttaccgaaggtgtactggcagcagagtttatctggggcgaagatttgaataagattccgggactggcagcagctgtaaaggctgatctggattctattcaggagaaaggtatgcttgaaacggtaaagggtatcctttaagtaagtaatatcatataaaaacagcgtcactgttcgttgtgaatggtgacgctgtttttatgtgtatatatgatatcaaagatagttctgatagaaaggagaaaaacagttttctttctattcagcttcagctgtatgaagaatgaatgtggtagctccgatagttacgattgctccgtcttccatgcggacgcggtctttatctcccagaatctcattcatgagaaaggtacctgtgaggctgggggcgtcccgtaatgtgtagacaagctttccctgtttgttacgcttcacattaatgatgcagtggcgtctgtccatactcatgtcaccgctttcgatcggagtattgataacggtacccacgcaacgacggcctatcacattatcaccttcttgcaacggaagtacttgtttgaaaccaaacacgttttcaataaccgtaatataaccgaattcttctttatgaacctccgcttcttcttccaggttctcttcctttctaagggcttttactttgctttttccgagacggatgctgaattgtttgccacaatgttcgcattcgaatacaagcgattgaccttcgctgtatttggtttcatcaaaaaaaaggtaattctcacatttaggacaaagaactcgtttcatgtttcaaaaggggatttattttgccagtaaccaggcattcttataagtttcgttttttctaagctccagtagttgtttggtagcttcttcgcgatttccgaatgaacggatgctgacacgtactttgccatcgctgttcaaggctttcgcttcggcaaatccttttgcctttaattgttctgccattgcttcagcatctttcagaccgattcctcctgctacgataatgtgaaagggatgattggcctgtggctgaactgcgggtgcaaccggagttgtcactgcggtcgtagtcggtattgttgctgtcggtgcggccggtgttgtttcctgcttggcaaccttgacttctttgacagcgataggtcttgaagttctggctttatcagcggtaactttcttcgtctgaccagtcgcattcttttgattatgctttgtttctacagaaacaggagtgactgcaaccgattgtttttctatttgctcaaaaagctcggcaggcagcaactgggcataattgttcttctcgacatacgtattttctacaggagtagagaatgcgaagaacataacgataacggcaatcattgccgcagcattacgaagaagggtacggctgatgctgatttcatacgttttcttttctttcgtcagactggcaggtaccagtattctttcttttcgctgcaacgcagagagctcacgcatctcaaaagaatccaatccatataatgaaggagtcgttatcttatgatcataaggagtgaattcgtagttcccgtaaatgttataacggatttcacccacgttttccaaatcggctttaccttcttcatgaagaatctcgacgaatgcgttcacctctttctccaccatacgggtagcatcggcaaaactggtgtcatgcgcagacatataggactgtaccaacacgccgtcattcagtttaagctgagaattgaaaccgatgatacgggtaggaggtaaaaaaagattttcttcttttacataggttgcgggagcgtagtgtgctacgaatccgccaaaattaggaacgattacgcaatcgttctctaacaacagagcctctatgtgttgtgctaattcaatcatagtgcaaaattaagagattaattgaatatatcccagaaaacttcgaaaaaatcactacttttgcatcgttttacttattactactaacgatgaactatatacagacagaaatagatggggtgtggctgatagaacccaatgtttattctgatgaacggggctactttatggaagcctttaagaaagaggagtttgaagcgaagatcggtccggtagactttgtgcaggataatgaatcgaaatcgtcctttggcgtattgcggggactgcactatcagaagggtgaatacagccaggcaaagttagttcgcgttctgaaaggaaaggtgctggatgttgctgtcgatttgcgccggtcgtcaccgacttttggaaaacatgtcagcgcattgctcagtgaagaaaataaaaggcagttttttattccccgtggttttgctcatggctttgtggtgttgagcgaagaagctgtgttcatgtataaggtagacaataaatatgctccgcaagcggaagcgtctatagtatataatgatgaaacgttaggcatcgactggatgcttggggagtcgcagatgcttttgtcgcccaaggataaagagggcatggctttcagagatgctgtatattttgaataaactctaacaaacgatagatatgaaaatagcgattgtcggaaccggttatgttggtttggtaaccggaacatgttttgctgaaatcggcgtgaatgtaacttgtgtagatacgaatagcgagaaaatagaatctttgcagaaaggagtgattccgatctatgagaatggattggaagaaatggtacttcgtaatgtcaaggcaaaaagactgaaattcacgacttcgcttgagagttgcctggatgatgttgaggttatatttagtgctgtcggtacacctccggacgaagatggcagtgctgatttgagttatgtgctggaagttgcccgcaccatcggtcgtaatatgaatcaatataagttggtagtgacgaagagcacggttcctgtaggtactgcgcgcagagttcgtgctgctatacaagaagaactggataaaagaggagtaaacattgagtttgatgtagcttccaatccggaatttctgaaagagggcaatgctatcagcgactttatgagtcccgaccgtgtagtggtaggagtggagtctgttcgtgcggagaaactgatgtcgaaactctataagccgtttttattgaataacttccgtgttattttcatggatatcccatcggctgaaatgacgaaatatgcggctaactctatgttggcaacccgtatcagctttatgaatgacatcgcgaacttgtgtgaactggtaggtgccgacgtaaatatggtacgtagcggtatcggttctgatactcgtatcggacgcaagttcctatacccaggtatcggatatggtggctcttgttttcctaaagatgtgaaagcattgatcaagactgccgagcaaaacgggtatactatgcgtgtacttcgtgcggtggaagatgtgaatgaggcgcagaaaggagtcttgtttgaaaaactgatgaagcagtttaatggtgatttgagaggtaagaccatcgccttgtggggattggcttttaaaccggaaacggatgatatgcgtgaggctccgggattggtattgatcgataaacttctgaaagcaggttgtcagatacgcgcatatgatccggctgcaatgaatgagtgtaaacgtcgtatcggtgatgttatttattacgcccgcgatatgtatgatgcggtacttgatgctgatgtcctgatgttaattaccgaatggaaagaattccgtctgccttcatgggctgtcatcaaaaagactatgaatcagcaaattgtgttggatggacgcaatatctatgataaaaaagaaatggaagagctcggatttatttattcatgcattggtaaataagataattagagtatctttatacacaaaatttagacaaatgacgaaatatgtagcgatatcgttagtagcgatcttgctcgcagcatgtaacagcagtaagaatccgcactcttcctccggacaagaggaggatttgagtgcgaaagaactgctgcaaggaatctggctggatgatgagactgagagcccgttgatgcgtatagaaggggataccatctattatgcagattcgcagagcgctcctattacattcaaaattatacgggatactctttatacttatggcaatgatactacctattataagatagataagcagggggagcatattttctggtttcattcgattgcagataatatgatcagattgcataaatctgaagatcctaatgattcgttatcttttgtcggtcaggaaatgattattcccacctatacggaagtaacgaagcgcgatagtattgtgaactataatggtagccgctatcgtgcttatgtgtatatcaatccatccaaaatgagggtgatcaagacgatatatactgaagacggtattagtatggataatgtgtactacgataatgtgatgcacatttgtgtgtatgaaggcaagaagagcctgtttgccagtgatattaccaagcagatgtttgaaagtgtggttcctgcggatttcctggtgcaggcaattttatctgatactaaatttgtaaaggtagaccggaatggtttccattatcaggctgttttatccattccggaaagttctatttacagtatagcaaatttgactgtcagttttagcggcaagttgactattactccgacgaaatagccaaatgttttttagtttcttgcaggagaagaggggcggttattgcctttttttccattgttgttattcctttttcctccgaagcttcttcttttagaactgtcacctctcttattgttgtaagagcggggcttgtattccggtgcttctcctaattcggcgggaacgggaattttatatatttctttttcaagaaagttctcgatggatttgaagttgctctgttctttctcgctgataaaggtgagtgctactccgtcattgttggcacgtgctgtacgtccgatacggtgcacataatcctcgctgtcatgggggacatcaaagttgataaccaatcggatgtcgtcaatatcgataccacgagcaacgatatccgtagcaaccagaatattgattcttccggctttaaattcgtgcatgaccacttcacgttgtgcctgttcaagatccgaatgcatttctcctacattcagtttcatcattttcagagcctttgttacttctttaaccttgattttggaggaagcgaaaataatcacacgttcgggtacttcgtcagtaaaaaggctgcgtatgatacctagcttctgattctcgtaacatacataagctgcctgaatgattttatctgccggtcttgaaacggcaagtttgatttccgccggattattcagaattgtttttgccagttgctgtattttggcaggcatagttgccgagaacatgattgtctgtcgttctttcggcaaatatttcacgatttgcatgatatcttcgtagaatcccatatcaagcatacggtctgcttcgtccagtataaaataagaaaccttggaaagatctacgtatccaaggcttaaatgggctatcagccgtccgggagtagctattactacatctgcacctaacgtaagtcccttcttctgttgttcgaaaaggattccgtcatttccaccgtatacggcaacactcgatgcgggcataaaataggagaagccttccatttgctggtcgatttgctgcgccaattcccgggtaggggacataatgacacagttaatggcatcttcgggatgtcctccttcggataacttattcaggataggcagcaggaatgctgctgttttaccagtgcccgtttgtgcaactgctatcaaatctttaccttctagtatgattggaattgcttgttcctgtataggcgtgcactcgtcaaatcgcatggcgtcaagcgcatcaagcacatttgcatttagttttagttcggaaaacttcattacttctttttatttgccgacaaagataaaatattttttggtctcaattacatattcaaataagaatctttgaatcccaggaaatagagcactccgtcaagcccgatggtattgatggattgtttggcatttgccactactttgggctttgcgtggaaggcgattcccagtccggcgattcccagcataggaaggtcgttggcaccgtctccaacggctatcgtctgagcaatatcaaccttctctacctgagcgatcagacggaggagttcggcttttcgtttgccgtctactacgtctcccagatagcgtccggttaatttgccgtctacaatttccaattcgttcgcatatacgtaatctatgccgtatttcttttgcagatactgaccgaaataggtgaatcctccggaaagaatagcaattttgtatccatattttttcagtacatacatcaggcggtctactccttccgtaataggaaggctttctgctatttcctgcatgactgattcatccagtccttttaacaaggctacacgacgtgtgaagctttctgtaaagtctatttctccacgcatggcgctttctgtaatggcctttacttcatcgcctacacctgcacggatagccagctcgtcgattacctcagtttcgatcaaggtagaatccatatcgaaacagatcagacgacgcatacggcggtacatattatcttgctggaaagaaaagtccatctcctgttcgctagccagctgcatcagtcgctcctgcatggcgatacggtctttcggggtaccgcgtacggagaactcgatacaggcacgggtacgggtatccgttttgtcctcatccaaagggatacgccccgtcagacgtttgatggcatcaatgtttaagtcttgttctgctagtacgcgggtagcggcagatatctggcgggcggacagtttgcggcccaataccgtcagtatatagcggtttttcccctgcatacctacccagttctcatactgatcggttcctatcggttcgaaacgaatggttactcccaatgaagatgccttaaacagcagctccttcataatgaatccggaatgcctttcttcgcttctgaaaagaatgcctaacgacaacgtattatggatgtccgcctgtccgatatcaaggatagtagcgtcatacttggcaagtatttcagttacggaagcggtaagtcccggacgatcttcgccggtaactcgaatcagaatcaattcagtatttgatggttgcataagaaaatagactttaacgctgcaaaagtagggaaaaaagttcgtttttatgctaaataacataaaaagttatacccaaaaagtaagaaaatggcttgtttttttggaagttaatttaataattacttacctttgcacccggtttcaaaattaaaggcactgataatcagcggattcctcttcgcctgatgcctgaaaagacaacgtttcgggaagaaaccactgtttaaggacagtcccggatagtattaactaaaaccgcattacatgaattcttatgtaaaatggatttttgttgtattactgatttgttccttgaccgctttcgttgagaaagacaaacctaccggaggtttgagtgagggtgacgtagcccctgattttaaaatcgaatctgcgtcgaatgggcaaccggcttttaagttgggtaatttgaaaggtaaatatgtgttgcttagtttttgggcaagttatgacgcgcaatcccggatgcaaaacgtaagtttgagcaatgtgcttcgttcttcccgtaatgtggaaatggtttctgtttcgtttgacgaataccagtcaatctttaaggaaaccgttcgtaaggaccaaatagttacgcccacttgtttcgtggaaacagaaggcgaggactctggattatttaaaaagtaccgtttgaatcgggggttcacaaactatttattggatggaaatggtgtgattatagccaaaaacatctctgctgcagatctttctgcttatgtaagtgagattggttgacaatctcgaaaagagtaaggagaaagagggattttccggatcaccgtttggtgattaaaatggagaatagacaaaagaggaaatggatacaacaaaaaagttccgcctgtacttgctttcggcaagaataggcggaacttctattttagatctcctgaatctaagttttatgtttccttatttaggtgctttctgatacagatagaatgcgatgcctgcatagaggatattgggaatccagactgcaatcgcagggggcacgttaccgtttatggcaaaggtagaagtgattgtctggaacaggatataagagaaactcagtcctaatccgatacccagatgaagtcccataccacccttcgtttttcgtgatgaaagagaaaccccgatgattgtcagaataaacgaagcaaatgacattgcaattcgtttgtggtactcaatttcaaactccttgatattggcaaatccccgtcgtttctgcttttcgatatattcgctcagttccggactggtcagcatctcctgttgattcttcatgatcaggaagtccgacgggtccatatttatgatagagtcgatccggtctcctttggtgatcttttcttttagtccgtccagttcacgtaccatatagtcgtgaatggtccatttgttgaccgttgttgtatcgtaggtgatacggcgtgccgttaagtgggaaacaagtttcttgtcgacaaacttatccaatgaaaagcggttgccggttttcattccgtcattgtaattatcgatataggctatgacaccactgtccacttccagctgcacgttccggaccgagttgactttcttgggtttgatgtatttatcttcaaagttcagacgggtaacactgcctttgggaatgatgaacgaactcatcatgaatgttgccgcagcaatgatggcagcagagatcatataggggcgcatcattcttttgaaactcataccggtggagaacatggcaatgatctcagagttctccgccagtttggaggtaaagaagataacggcgatgaatacgaacagcggactgaacagattggagaagtaggggatgaagttcatgtagtattcaaagatgatcttgtcccaaggggcttcatgctccatcagcttgtccatcttctcgttgaagtcgaacaccaccgcaattgagataatcaatgcaatggcaaatacgtatgtccccaagaatttcttgatgatataccaatccagccgttttattaatcgattgcttttcattctttataatcttgttgacactctttttaccatcatcggcttccaggtagagaaatctccggcaatgatatgtttccgggcttcacctaccagccacaggtaaaatgccagattgtgtatagaagcaatttgcattgccagtagttcttgtgcgtggaaaaggtgacgcaagtatgctttgctgtatagcgtgtctacagcagaagcaccgtccgcctcgatgggagagaagtctgtttcccatttcttgtttcgcatattgatgatgccgtctttggtaaacaacatgccatttcgtccgtttcgggtaggcataacacagtcgaacatatcgactccgcgttcaatgccttcaaggatatttacgggggtaccgactcccatcagatagcggggcttgtctttgggaagaatctcgttgacaacctctatcatctcgtacatcttatctaccggttcgcctacggccagtccgccgattgcattgccatccgctcctttggaggcgacgaattcagcggattgcttacgcaaatcctgataaacacatccttgcacgatggggaaaagagactgattgtaaccgtatttcggttcagtttcattgaaacgctgaatgcaacgatcgagccatctgtgtgtcagtcctaatgactttttggcatacgcataatccgaatctcccggaggacattcatcaaaagccatcatgatgtcagcaccgatggtacgttctatatccatcaccttttccggagtaaagatatgtttgctgccatcgatatgcgagcggaattcggccccttcttcccgaagttttcgtattcctgctaatgagaatacctgaaagccaccgctatcggtcagcataggacgatcaaaaccattgaagcgatgcagtccgcctgccttttcaataacgtccagtcccgggcgtaagtataaatgataggtgttgcccagaataatctgtgcctggatatcttctttcagttctgttatatgcactcctttaaccgtacccagtgttcccacaggcatgaagataggtgtttgtatctgcccgtgatctgttgttatcagaccggcacgggcattacttttagtgtctgtatattgtaactcaaatgtcattcctggctgggtttctttacagataaatcaatggcatccgcaactttttcgtttgtcagtgcaattgcgaatacttcttttatgtcgtttacatagtggaattgcagtcctttcaaatatatgtcctgaatttcatctatgttctttttgttttcggcactcatgataatttccttgattccggcacgtttggcggcaagaatcttttccttgatgccaccgacaggaagcactttgccacggagggtgatttctcctgtcatggcaagattggctttcactttccgttgggtcagggcagaagctaaagaagtggccatggtaataccagctgacggtccgtctttcggaatggcaccttcgggcacatggatgtgtatgttccagttgtcaaagatgtcttcattcagattgaggattgaagcgtgtgctttgatgtattcaagtgccagcatagctgattctttcattacatctcccagattacctgttagtgtaagacgtgcacctttaccacggctcagactcgtttctacaaagagtatttcaccgccgacggcagtccatgccaatccggtgactacgcctgcatagtcatttccctgatacttgtcacgtgtatactccggtgctcccaggaattcatacaaatcagtcggtttaatctctgatttggcgaaataaccgtctgttgcatattgacgggcagatttgcggagaatcttgccgattttcttttccagttcacggacgccgctttcacgggtatatgattcgataatcgcttccaaagtatctttcggaatcttgatatccgtctttttaagtccgtttgcttccagttctttcggcaacaggtgcttacgggctatttcaactttttcttctgtgatgtatccgctgacttcaatcaactccatacggtcgagcaacgggccggggatcgtattcagattattggcagttgcaatgaacagtactttggaaaggtcataatctacatccaggaagttatcatggaaagaggtattctgttccggatcaagtacttccagcaaagctgatgacggatcgccctgacggtcggcactgactttgtcgatctcatccagtataaatacaggattagaggctcctgccttaatcagactcttgatgattcgtccgggcatagcaccaatataagttttgcggtgaccgcgaatttctgcttcatcgtgcacaccacccaaagacatacggacatattttcgtttcagtgccgatgcgatggattttccgagggatgttttaccaactcccggagggccgtacaaacagataataggtgatttcatatcgcctttcagttttaatacggcaaggtgttccaaaatacgttcttttactttttccagtccgtagtggtctttattcaacgtcttttctgcatttttcaaattcagattgtctgttgtataaactccccaaggcaggttaagcattgtttgcaggtagttgagctgtacgctgaagtccggtgattgcggatgtgtacgttccagtttcgctagttccttcaggaaagtatctctgacttccgcattccagtgcattttaactgctttcagacgcatctcttcaatttcctgctcctgaccgctgccgcccagttcatcctgaatcgttttgatctgttgctggaggaagtattcacgctgttgctgatcgatatcctcacgggcacgcatttggatggatgccttgatttctgccagctgtacttcgcgattcaagacttccaatagatgataagtacgctctcttagtgagttgatacttaataaatccatcttctcatctttcttgaatggcaggttggcacaaatgaaattaatgaggaacatcggattactgatgttttttatagcaaatgacgagtcctgatgcatttctgatgatttgatataacgcatcgtcaagtccttgcatgtttccaccagagcctgaaactctttatcgtctttgtttggaacatcttcttccaaaagttcgacctcgcccttcagataagggtgtgtatctacaatatctttcagacgcagacgtttcattccctgaaggatgactgttgttgtctggtcaggcatttccagtacccgtacaattcgtccgacagtgccgacattgtgcaaatcttccagtttggggtcttccgtgtgtgccgatctctggcaaatcactgcaatatctttgtgtttcttttcagcttcgcgaaccagctttaatgaagcctttctgcctactgtaataggtaaaaatactccgggaaacaacaccatattacgaagggggagaaccggaagaatatcaccggattttatattcacatcaaacacatgttcgtcattgccatcatagtcggtaatcagtgagaagccgttctcaccaacttcttcttccaataagtatctttctttcatcttttcgttttaatttagtttatgtcatacataatatgcataaatcgtttgcaaagttaattgattctctttaataataaagcacagtgtggaataaaaacacaaaaacaatgccaaaatatcgggcgttaatggatttattccataataattatttatttttgacggttttcagcaaagatcagtaaaaaacaggtttagatggctaataaaatggcgaatcctttctttcagtttaagcagtttacagtatggcatgacaaatgtgccatgaaggtaggtacggatggggtactcttaggggcgtgggcttctgttcaaggggctcatcgaattttagatattggaaccgggacggggttggttgctttgatgctggctcaacgtagtatgccggatgcaaatattgtggcgctggaaatagacgaagccgctgccgtgcaggctaaggaaaatgtggcccgttctccctggaaggatcggatagaagtggtgaagcaagactttctgtcctatcagtctccggataaatttgatgtgatcgtttccaatcctccttactttgtggattcgcttagttgtcccgaccaacagagaagcatggcacggcataacgattctctgacttatgaagaattattgaagggtgtggctgatttattgaagaaagagggcacttttacaatcgtaataccgacagacgtggctgacagggtgaagactgcagcttccgaatatcatttatatgcaactcgccagctaaatgtaataaccaagcccggaggaaccccaaaacggaccttaattactttttcttttgacaatggaggatgtactgttgaggaactgttgactgaagtagcccgtcatcaatatagtgaggaatataaagcattaacccgcgaatactatttgcacctgaaataatatttttgcacaaataaaaaaggagctacttaaatgtaactccttttttcgtcggggtagcgggattcgaacccacgaccccctgctcccaaagcaggtgcgctaaccggactgcgctacaccccgaaaacttttaaccgaactccctttttctttgtagtcggggtagcgggattcgaacccacgaccccctgctcccaaagcaggtgcgctaaccggactgcgctacaccccgctacttttaaagggttgttcttttcaaaagcggtgcaaagatagggagtattttttaattatcaataactaaatgaatgttttttattgattaaattacaatcgactgaaattcatctgtttgcaagtcaattttttttcttggcagaaataagaagcatcattggacgccgaagttcgtcttgcatttccggaatagtatccagcatcatttcacttggttggggctctatcaattcacaaatttcaaatccggtctgaagaagactattaatatatgtagttaaagtcttatgatacttcacgacttcttctcctaaaaaaacagcagtacgtttaccttcactgaaatagcggtctacaggccagtgagcacgttttccatcctggtcgtaataccaatcctgattgccataggctgtgaatataggatgctctactgaaaaaacaaaagaacctcctgctgcgagacagctgttgactttacggcatatattaataaaagattccagataatgaaaggtcaaggaactgattacgatatcataagtatccggttgaaagtcgaaatcctcgattgccatacatctatattcgatgagtggtgaagaatttcttttttgagcttcttccagcatcttcccggaaatatcaattcctgtaacatactttgctccatgttcaatggcatagatacagtgccagccaaatccgcagcctaaatccagtactctcttgtctgtaaagtccggtagcattttctgtaatatatgccattctccggcaccttgcaatccctctacagagcgtgacatttgagcatattggctgaagaagcggtcatcgtcatatttattttctttcataacttcaatgaggttcatattaggttgggcaaatatatgcatttatgcgattattgggacgaattaactgaaaataaaatcagataggatgaaccatcttttgctgttttctgttttcaaagtataaaactaaaaatgaaaaagccatatgaaaacggaaaaacaaaaagaaacgaatgaaaaggaagttcctttgttagaacaaaaaggatatgaaagaatggtcaatgagattgttccggtacaacaagcggaagcttaccgtaaaccgactcagaaagcggtaaaagaagctgtaaaggagttgaatcctgatacaaatagtttgggtagcagaggatgattgagtcctctgctattttagtagacgatcagcagagttaatgaacattccggctataccggactcaggttcgtttattcgattagtgaaaaaacgatcattctgaaaaaaagaatatttaaacgggcaggaaagactactgtcataagctaagaatcaataaacgcccgcatttttaaatatgaaagtacataattttattaattgtctgatatgctgattggattgaactgttcttttcctcgttattgatcattaagctggctgaatggcttaataataatcattatgctacttttcaccttgcttgtaaatctgataagttagatgaaaacaagcactgaatcgcctttttatctctttcccatcaaggaaaaataagttcctcggtgagaaaggtagcgttggtttaaaaccaacgaggtgttccttttaaaccaataagtgttttgtacatacgaaaagatgtatatattatgccgttttatgcaatatcaggctgcgttttcgcatattattgcatttatttatgcagtttattttctggtttgttgcttttggtacaataatttttcgacgtaatcttaagaatagcacatcaagatgcaaatatcaaagggctcttatttaggaaaagtaaggataaaactgcttcctttacccacttccgacttaacattaatacttccttcatgcaaagtcatgatttgcttgcataaacttaatccgatacccgaaccggatgttttggtggtaaagaaaggaacaaatattttatccagcacatcgggcagaataccttctccattatcagatatcgttaatgtcgtatttccggcagaaagttttcttgcttttacctgaatcttcttatctgatttccgactgcatgcttcacgggcatttttcagcagattaataagaatctgttctatttgtgtccggtccgcatttaatttcaattcgggtgtgggcacctcaaactgaaactcttcttccggaaacaacttctttaaatccgtgaataattccgcaatagaaatctgtgtacgaataggagcggggattcgtgtgagccggcgatagttctctacaaattccagtaatcctttgcttcttctgtgaatggtctgcatggcttgcagcataacagaatactctttttctcccagttgactggggattcctctctcacttaatgtttccgaaagagaaatgattggtgtgatagagttcatgatttcatgagtcagcacgcgtatcagcttttgccaggcttccatttcattgcgttccagtacggaatgaatgttttttaagctgattaactgctgttctctgccttgggtagcaaatgtagtgcgtgagatggccatttccagcacagtactattttgttcgatacggatgacgggggtgtcattggcaacggaagccttcagtaatgtttccggcaattgtgatatttgtcctaagtgggtaacggccgcctgattcatccattctatatgtccggctttgtcggcaacaagcactgccgtatcaactttgttcaataagttctcgtaatattgatgcttgatttcttctgccagcaatcttccccgaaaatcttttaaagtatccgaaagttcttccgcccattcattcattattttatttttgaaaggtggatggaaagtttgcatcatgtcattatagcgaaggccgtctgtcagtcgtcgcaacagggcaatttgtttgaactgcatacggtaaagatgtacagcggtagttatcagtaatataatgcagatagtagtactgaaccataactgtttttgaaataacagatagctaccgatagaaagcaatactatcaataagatatgtaaaattactctgaatgcaaatcgtctcataagcctagtttttcaagtttgcgatataaggcaaagcgggtaatgcctaaatagtcggcagcacgggaaatattcccttcactaagtttcattgctttttcaatggtttgccgttccagttgttcaaggttcaaaacaatttcttcttcctttttttgtttgggggtgacgtggaactggaagttttcgggttttaataaagaaccgtctcccaagattacgacacgttccattgtgtgttgtaactcccgtacattgcccggccacgtatatttcagcaacttatttttggcttcccgtgtcaagcctcgcatttcctttttatatttgcgtgcataacggtccagaaaatattcggcaagcagaatgatatcattcccacgttcgcggagtgggggaatatgtatttcaattgtgttaatacgatagagtaagtcctgacggaagcttccttcatccaccatacggcggatatccgcattcgttgcgcaaatcagacgaacatcaataggcacggcctgtgtgcttcctaagcggctgatctgccgtttttcgatcgcagtgagcagcttcgattgcatgggaagcgaaagattaccgatttcatcgaggaataaagtaccattggtggcaacttccatccgtccggcttttgactttttagcatcggtgaaagctcctttttcaaatccgaacagttcactttcgaaaagttgttcggggatacttcccaggtcgatggtgacaaaaggtttgccgtatcggggggaacagcggtatagcagtcgggcaatcacgtcttttcccgttccgttttctcccaaaatcagaatgttggcatctgtactgctaagtttgtttatggttgcgaatacttcctgcatgactggagattctccgataatgtccccttccggagaactttgtccgctgagtgcttccacttgctcttttaagatgtttacctcccgttgagattggcgcagacgcataccggaggtgagagtagccagcaatttttccttctcccaaggtttggggataaaatctgttgcaccggctttaatggcccgtacagctttatctgtatccgcatatgcagtcatgaagatgacaatagcttgcggatcaatctgcaaaatctgcttcagactttcaaaaccttcttggccgctaattgcatcacggctgaaattcatatctaataagataagatcgggctgaaaggtagtcataaaatgctcaatccggtcgggagtggtagctacctttatcttttctgtataaggttcgagtagtagattgagggcaaagagcacatcttcgttatcatctacaatgagtatctttcctagtttgttgacttcatccatagggtatggggtatatgattcgttacttatcctaaagttttaatgcaagggcaaagatatggataataatcatgtgttgtatgtgcgattgcgcactagatttgtgcgtatttgcacgctgtttgtaatagtgtggtaaatgtaaacaactgaattagaatgaaatataagaatggcacaggttttgaatggtaaataacaaataaatctaagaatgaatctgaaaatactctatataacactcggaatcctgtcgactgaactgctgtctgctcaaaatcaaacaatggagatgtcgttggagcaggtggtgaaaatagcccgtctggaatcacctgatgcacagactgcacgacatagttttcgttcggcttactggaactacaaatattatcgggctaactatttgccatctttgagtttgtcatccgatcctaatctgaatcgtgccatcaataagattacaatgggggacggttccgttaagtttgtcgagcaaaatctgttgaataccgatctgactttgaacctgtcgcagaatattccctggaccggaggttctctttttctcgaaacatctgcgcaacgtatggacttgttcagcgaacataaatactcatggcaaacttctcctgtcatgataggatatcgccagtcgctttttggttataatagtctgaaatgggataaacgtatagaaccggtacgctatcaggaagccaagaaaagttatgtggaaacactggaacttgtttccgccaatgcaattaataaattcttcgctttggctaccgctcaaagtaattacgatattgcttctttcaattatgcaaatgccgacacactctatcgttacgctcaggggcgctacaatataggcacgatcacagagaatgaaatgctgcagttagaattgaatcgtctgaccgaagaaacaaatcgtatgaatgcccgtatagaaatggataattgtatgcaggaacttcgttcttatctgggcattcaggaagatcgggaacttcgtgtgcatatcaactcccaagtgccggatttcagtgtcaatctggatgaagcattggcattggcatacgaaaatagtccggatatacagacgatgaaacgaagaaaactgaaaagcgagagtgctgtggcaagagcccgtgccaatgcgggactgaaagcagatatttatctacgtttcggactgacgcagactgccgaaaagctgccggatgcttatcgaaatctgttagaccagcaatatgtaagtctgagtatcgctctacctattttagattggggaagagggaaaggacaagtgcgggtagcccgttccaatcgtgatctggtatatacgcaagtggagcaaaaccggacggattttgaattgaatgtccgcaaactggtgaaacaatttaatctgcaaacgcaacgggtacgtattgctgcccgtacagatgaaacggctcaacgaagaaatgaagttgcccgcaaactttatattttgggaaaatccactatcctcgatctgaatgcttccattgccgagaaagatagtgcccgccgtaattacgtgtcggctttgtacaattactggagtttatattacacacttcgaagtatgacactctacgattttgaacgaaacacgctgttgaccgaagattacaatcttctgatagaatagcaacttactcattcagctgtaataaataaaaatataaaatacctgataaagtcatggatataaaattagaaaagaaaccttggtatattcggtacagatactatctgataggcggacttttgtttgctgcctttctgatttatgtaattgttctgtcattaggcccccgaaaattacgtattgatgccgaaaatattcagatagcgaaagtgaaagaggataattttatggaatatgtagatgtggagggtttgattcagcctatactgactatcaaaatcaatacccgcgaagcgggaagcgttgaaagcatcgttggtgaggaaggaagtctgctccagcagggggataccatcatcgtcctttccaatccggatctgctccgcagcatcgaagaccagcgtgacgaatgggaaaaacaaatgatcacctatcaggaacaggagattgagatggaacagaaaagtcttaatctgaagcagcaggctctgacgaataattatgaactggaacgactgaaaaagagtattgcccttgatcgggaagagtttcagatgggagtaaagagtaaggctcaactacaagtagccgaagatgaatataactacaaactaaaaaatgcggcattacaacaagaaagcctgcggcatgattctgccgttacgatgattcgtaaagaactgattcgcaatgaccgtgaacgggagcgcaagaaatatgaacgtactcacgagcgattgaataacctggtggtgacggctcctataaaagggcaactaagctttgtcagggttacttcggggcagcaggtttcttccggcgaaagcattgccgaaataaaggtactcgatcagtataagatacatacttcgctaagtgaatattacattgaccggatcactaccggactgcctgctaccgtcaattatcagggaaagaaatatccgctgaaaataacgaaagtagtccctgaagtaaaagaccgtatgtttgatgtcgatcttgtctttaccggtgatatgcccgataatgtgagagtcggcaaaagcttccgtgtacagattgaattaggtcagccggaacgggcgctcattattccacggggtaatttctatcagtctacaggaggacaatggatttacaaagtgaatgcttcgaagacaaaagcaatccgtgtaccattaagtattgggcggcagaatccgcagcagtacgaaattacggaaggtttgcagacgggagattgggtaattacgacaggatatgatacctttggcgatgcagaggagttgatattgaaataaggaatatataatattatgaagataatacggttggtaatttattaaggaaccgatttatttctcataaaaacgaataaacacaataacttttaaatatcataattatgatcaagacaattaatttgcagaagattttcaagaccgaagaagtagaaacttgggcgttgaataacgtaagtatcgaagtgaaacaaggagagttcgttgccattatgggaccttccggttgtggaaaatcaacattgctcaacattcttggtttattggacaatccgacaggaggggagtattacctcaatggaacagaagtttccaagtacacagagtcacagcgtaccagccttcgtaaaggagtgatcggtttcgtctttcaaagcttcaatctgatagatgaattgaatgtttatgaaaatattgaattgcctttgctttacatgggtatctcagcttccgaacgcaaaaaaagggtggagactgctatggaacgaatggctatcacacatcgcagcaaacacttcccgcaacaactttccggaggtcagcagcagcgtgttgctattgcccgtgcagtagttgccaatcctaagctgatcctggccgatgagcctaccggtaatctggattcaaagaacggtaaagaagtgatggggctattgagtgaactaaataaggaaggaaccactattgtgatggtaacacactcacagcacgatgccggttatgccgaccgtatcattaatttgttcgacggacaggtagtaacggaagtcagtatgtaatatattcataaagtaccatgattaaacactatttgaaagtagcctttcgcaatttggtaaagtacaagacacagagccttgtcagtatcattggcctagctgttggtttcacttgttttgcgctgtctgtcttatggattcgttatgaaatgacttatgatactttccataacggggccgaccgtatctatatggtatgtgcgcattatactgattcccctagtagtacatccaatgttactccttaccctttggcgaactatttgcaggagaaaatgccggagatagaagctactgcttccacttccatatatcgggatatgaaattccgtctgggagataatgaacaggaagtagtaatggctacagcagattctgttttcatgaactttttcaatatacggctgctgaaaggaactgtcaacttcctgaaagaaaatgatccggaaatcgccattacggaagagtttgcccgaaagcttttcggcagtgaagaggatgctttggggaaagaagtagcactgagcggacgtccccgtaaaataggtgccattgtgagcggatggtcccgtcattccaatataccgtatagtgtattgagttcggcaaggcgctatccacgttggagtagtaagggagaacaactgtttatccgtgttcgcgcaggtgtggatagggatacttttcaaaagaagatggaagatattgatatcttggatattcccaaagagagcgagcttgcgaaacttctgatcacgcccatttcggctttgcgttattcggattatgtttctaaagtagatgtagtcatctccttcagttatattttctatttctctttagcaggcggactggtcattatttgttccttattcaattacctgacgctttatatcagtcggctttgtatgcgcagtcgtgaaatggcgcttcgtaaagtaaatggcgcaagtaatacatctttgtcggttcagtttgccattgaactgttattgattctatgtatcgccctgctatgcggattgttgatgatagaggtgagcatgtccggcttcctgaacttcacacagatagagacaggttcatattatggagagatcattgcatatcttttgattgtaatcattctgtctttcctgtttgcacagatgcctttatcttattttcgccgccggacattgcaggaagcgataaaaggaaaagtggtaactaccagaccttatctgtttcgtaagataggaattatcatgcagttagttgtcagtcttgcttttatcttctgtgcggctgttatgatgaagcaactctattttctgaaaaatacggacttaggaatggaacgtcataatgtcggtaatgtagccttgtggaatggagatatcaagcaatggtcggggaaaatagctgctttgcccatggtgacagaggctttgcccccttcgtatttcccgattattcctacaggaccgatgatgtatgccgaaataaacaactgggatgattcgccgaaagcggttgaagaacctttaactgttggtatgatgcctgctaaagaagaattctttgaattctataaattgaatttattggaaggcgagtttatatcggacaagaatcaagaaaatgaagtagtgatagatgaaaatacatgccgtaaatttggatggaaacgggctttgggcaaaagtttctatcatgaatataatggtcagcgtagcttatataaggttgtcggagtagtcaggaactttagctatcgttctcctacgagtgaaccgggactgattgcttttcagcatcctaaaacgcaagattatctgttgaatcgtgccagcattttgtttaaatttagagagggcacttggaatgaatgtcgtgcgactatagagaaactatacagagaggaatttccaaattcttatatgcgattgttcaatgaagaagaagaatataacaagtacctccgttccgaagatgcactgatgaaattattgagttttgtatcattggtttgcgtcattatttctgtattcggagttttctcattggtaacgctgtcttgtgaacagcgtcagaaagagattgctatacgtaaggtgaacggagcgcaaatccatcatatcctgcagatgttcttccgggaatatttattgttattgatcatagctgctgttattgcattccctgcaggatatgttgtaatgaggagatggatcgatagctacgtgagacaaacatcgatagatagctgggtatatataagcatctttgttgtgatagctattattcttttgcttagcatcatttggagagtatggaaagctgcccggcagaatccggcagaaattatcaagagtgaataacgtaaacacaatatcatgatatatcattatttaaaaatagcttttcgcaatctgatcaagtacaagacgcagagtattgtaagtatagtcggcttggcaatcggtttcatctgttttgcattgtctgccttatggatacgttatgaaatgacatacgatacgtttcatgaaggggcggaacgcatctacttggcaggtaacaagtttgaattgcagggggacggattctcttatttttctcctaatttattggctgattatataaaaacaaattgtccggaagtagagaaggtatgtcatatccgttatgattcgagcagaaaaccgatgaaatataaagatacagaatacaagatgttacagatggaaattgattccacttttatttctatgttcaatattagtgtgttagatggaaaaagtcgtttaatattagataaaaatgaaatagccattacagaggagatagcaaaacagatttttggaaaagaaaatccgataggtaaacaattactctttccgcagagtaataattctgaaaaaactatcgtggcgattgtaaagtcatggaaagggcattctttacttccttttgatattttattgtcctatgaacctgatgatctcaattggaatagatcagaaagccaaacttttttacgtgtctatcctgatagtgatataaaagtactggaacagagactgacaaactacgagatagaacaagattcacataaatggttaagatcaacgccaattgctttattgtcaacattgagaagtactcacccaaggaaggatgtaaatgtcaagttgaatcatgttcgtctttttgcctgtatgggtgctttggttattatttgtggattgtgcaactatttaacgatgcttgttactcgtatccgaatgcgtaaacgtgaattggcattacgaaaagtaaatggagcttctaatgcgaatttgctatcgttactactttcggaactggccttgatacttgttctttctgcagggataggtgctatgttaatggagttgattctgcctgtttttaaatatttatctcaaataaatgagaatacttcgtttttttatagcgaagtactgatttatatcttgtctttagttgtaatcaccgtaggcattgctgctgtgcttatacactatatcaataagcagactttacttgaaaatatcaggcaaaagtcaaatcttcatctttctggttggctttataaaagcagtattctgttgcaactctttgttagtattggctttattttctgtacttttgttatgatgaagcaattaaactttctacagaattcaagagaactggggcttgaacgtcataatgtaggagtgattgcccatgctttaggctgtgagagtgccgcggtaaaacagatagtagatcagatacctgatatcacagaacatttggagggattctataccccgattccaaaaatgttatattctacttttaaagtgtgtgattgggaagggaagtcagatgaggagcaaagtttcaatatggaagatgaaactataaatcaggattttgtcgattttttccaaatcgagattttagaaggtagcataccggatgagaaagatgaaaaaggaacagttgtcattaatgaggctgctgtaaaggcttttggatggaacgaaccgataggaaaaaagtttaataaggaatataaagtaaaaggtgttatcaaagatatatattataatgctcccatacatccggtggctcccgctatgttttctttgcaaaaaggtcgtgaaaatggacatattatttttaaagtaaaggaaggcacatggaataaagtatcacagaaattgtatgaggaggtgaataaggttaatcctaatgcgatagtagatttggtaaatatgggagatacctacaatgaatacatgaagtcagaaaacacattaagcaagttattgagtgttgtttctcttatctgtatagtgattgccgtatttggtatattctccttagtgactttatcatgcgaacatcgtcgaaaggagattgccattcggaaagtaaacggtgcaagtgttaaagttattttgaacttattctttaaagagtatttgattttacttgtcatagcgtcattcatggcctttccattaagttaccttatcatgaaacactggctcgaaggatatgtaaagcagacgccgataaatctttggatatatggaagcatatttgcaggtatgttacttataatattccttagcatcatctggagagtatggaaagctgcccgacagaatccggcggaagtaatcaaaagtgaataacatccttattataaaagcaatatgaagaaccaattatctgctatcaggactttatcccgtttcagaacatacacgatgatcaatattatcgggcttgcagtcagtgtggctgcaacgctgataattgtacgctatatccatcaggagataacagttgaccatttctgtaaggacctggaccgattgtatttgctgactattcaaaagagtaatggaagcatttcgatcgcagataatacagacaggaataatgattctaattttatagaccctttaaagaatccggaagtaaaagcatattcttatagtgtttcttttgacgatgattatattgtagtcgataatcaccgttaccgggccaatgttttggtaactgatagcttgcttttgcagttgatggactatccgatagtttcgggaattaaaactattcagaaaccggatgatgcaattattacccggaaatatgcccggcatatttttggtgacgaagatccgatagggaaacaattaacttcatcatcaggttctgtacttaccattcgtggcattgtggatgaaccgagtaccaaggcatctttgcaattcgacctgatagctccggtgaatcaggggaaatatgcagactggagtcgggtgggattctgcatggtccggctggcaaacggaacagatctgaaaaagtataatgaaaagatttccaagccacagtcattaatatgttacagtcattcccctatacagtatgggcttactcccttgaaaggattgtatttcaataagattgtcgaaccttcgggaacttcttttttgcgagggaatatcaaccatgtgatgattttgactgtagtggcttgtatgctgttgttggtaggagtctttaattttatcaatatctacacggttatcgttctaaagcgggcacgtgagtttggtgtaaaaaaagtatatggcgcaagcggctttcagatatttacccagatttatgtagagaatatatatatggtggcagtcgccttgcttattatctggatgctgatcgaaacttcagccgggatattcgcctcggtatatgcaattcctgtaaaaccggatatcgtttttgatctgtcgctgtctctcattttattattcgtgttgccgttggtgacgtctgtctttcctttcttacgttacaactattcttctccgatcacctctttacgttctgtaaatgccggaggaaattcaattgtttctcgtgtagtattcttatttattcaatatgtcattacgttcagtctgatagtagtcgcattgttttttgttcgccagttgtacacaatgctgaatgcggatttaggatatcaggcaaagaatatcatttcatgccagttcctgtcattcgagacacaaaacagaagatatgcaaatgatgaagaatggcagaaagaacgtgacttggagcggcataaaatacaagttaccaaacaaaagatggatgcatgccctttattcatttcatggggatatggtgaagcccctatcaatctggaaccatacgtcaatgtggagagtaacggagagaaacataaaatggctatcatgtatgttaataataattatatggatatgtttggcctgaagttgaaagaaggaagaacgtggaatgataaagaccagtttgcccaatataaaatgatgataaatgaaacagccagaaagctcttccggataaaagatattaatgaagcttcactgcaaactgagtcccgtctatggtggagtgtggggacagatgaaagtaaaaatcctgcttatcaggtagtaggtgtgatagaagacttccggaccggacacttatctatgggggatgcaccactggctattctgtatgatgaaggagaaaaccctaccgaacctttaatggctaaaatagccgaaggtaaacgcaaggaagccattcaattcttgaaggaactacacaacgaagtaatgggtgagggggagttcaattactccttcgtcgaagatgaagttgaaaaactgtacgatgatgacaagagaacgacccgcatctacgtcacctttgccggattggctatctgcgtttcctgtctcggactgttcggattgtcattgtatgacattcgtcagcgctatagagaaattgcattgcgtaaagtgaacggagctacaggcaaacagatcactttgttattggtcaggaagtatctatctattttgggagccgcctttgttgtcgctattcctttggtttattatattattaatgactataccaaagactttgcggtgaaagctccgataggagcagggatttttgtgacaggcttcatccttaccttgcttatctcactgggtacattactctggcaggtacgcaaagctgtccgcatcaatccggcattgatcatgaagaacgaataagattaaaaatgactaagattacaacgaatggaacgaactgctatggaaaacctcgtactattaaaacttatattcagaaactggtggcgcaataaactttttgcggtcatctctttggtcagtcttgtggtcggtatttcctgtaccaatcttttgatctcgtttgtcatccatgaatatacgatagaaggggaaaatccaaagaaggaccgtatcctgcgcctgactcagcgactgccatccatgcagagcaccggacaagtatcatttgtctacggaggatcggttgccggaatgatagcttcgtttccggagattgaatcttatctccggctgaccgagaaggaggcaactcatattgaaattgagaaccagcgctttcctcaacaggtcattgttgaggccgacagttctttctgccgttttttcccgtaccagatattgtccggcaatatgaaagaagccttgaccaagccggactgtattgctttgagtgaagaaaaggccatgcaatacttcgggaagttcgattgtatcgggcgagaactttctgtggtatatggagataaagttgaaatgaaaaaggtatctgccatatataagttttatgcgcagtcagcactccgtattgatttgcttggtaattctcagaacctgcaggaagaaggaacttcctgtatgattcttctcaaagaaaagactgacgtgtcagccttttgcgagcgttttgagtcaacagaactgcctacagtgacaggtcccggttattataaactccagacattacaagaatcctactttgacacaaaactggctgattccgtgaaaacattcagtcatcggcagatcgctttgttgagtatcggtttattatcagcttttcttgtcttattcatcgcttgcttcaattacgtaaacctaagcttttcgcgcctgctgaaacaagtaaacatgattcatgtagagacattgatgggagcttcccattcatatatttgccggcaactttttattgatacattccttaccgtatttattgctttcatcctttccattcttgtaatgggggacatactttctcttttcaattatttctttgatgcccgtctgactttcggtttcattctttcatggaaagtctttccatatattcttctgtttgtttctcttttggccattataccggccacctatatgacgaagaaactgaaccgcatttctatcagcggatatcggcaattttttcaagggagaaaaagaagaagactggtagcgacccttgtaggcgtgcaaatggttatctccatcggattgatgactgcctttatgatgatacgtacgcaactttcaaccatagaagagcagggtgaacgctttaaaggaattttaatcttaggtaatgaggggactgccctgaccgtccctttgtataatgacattaaaaacctgcccggtatccaaactgccctgttatccaaagggcggataacgagtccttttaatatcatcattccactaaacaggaacgggcaggaagtaatggtaaataaagttttattgaccgagaactatgaactgctggacttattcaacatagaacttctcgaaccggaacgaacgaaggatttattttccaaggtagcccatccggtagttgttaatgaagcctttgtgcagttttttgtgccggcaggagaagacccggtggggcaggccttaagcaaatatgcgcaggacaacgccggtgaaggaactattattggtgtatgcaaagatttcagactgacttctttcaactctgccattactccgatgcagatcattcttcaagagattccggttgatcaggcaacctacctgtcttgtcgtatagatgagagcagacgcaatgagatagtaaaaaatctccggttgctgtgggagaaacacgagccgggacattcttttgtttacatagacgcctatcagcaatatatatccaacaatacagatatggtgaatttctcccgattattactggcttatgctataatcagtttgttcctgaccctttttggtatctttggaattacatggtatgcggtagaacaacgaaaaagagaaattgcgattcgtaaagtacacggtgcctcttcccgccaaattctattgttgttgaaccgtccgttcttctattatattctgatagccgacgtgattgctgtccctatcgtatatgtcttgatgaaacggtggagggaacagtttgtgtatcctgcgaattggggaatagaagtatttatagtacctgtcgttttattaatgcttgtaacttttgtcacagttgtccttaacggatatcatacggcattaagtaatccggctgagactattaaaacggaatgatcactatgaatatgtagttcttcagtatccagtttctaagaagataaaacgttcttcctttgccgtcgactttgaagcttaatcaaccgttggaaaaacaggaaaggtggcatcggacaaaataaaaagctactctcttttgggggaagagagtagcttaacttcaagatgcactatagagtgcacttgctataaaatacctatcgaatgctcatgtgtcagttaataatagtgcccttgacatctagttctctgatagcagcgacagtactgtttcctccgtcatcggggatcgtgagtctgatgtaacgtgctttgatcgattttacataatattccagggcggcatcctgattcgtgaatccgaatctgccgataggagtccagttcacgttatcttcactagctgcaaactcgaccactttgataggattgtttgaacctctgccgcgcggaagcaattccacctgtgctatttgtatgttttgcttcatatctatcacaatatcatacggtagcgggtcgcttccaccttgccatttggcatgccagaatgtttcagtgtctccgtctatcagacatttggctaatccattgccggctccttctcccgaagcttcctgtgtcgtaaaggacagaacttcccagccgctctttgatattttcgttccttcttttatgatgcagaatcctgtgtaggtgtctttatccgcacggatagtggcatcggaagtaacttcgcctatttgcacaggaagcatataatttcccggaagaatgttatctttcagcttgtaactgactgtggtctgatcaactccctgagacaatgacggggattcgggtttggtatagcactctgccggcagaagactgaaataagtctgattggcactgttgtatgtatctactaccgactggttgttgactaaagtacagttgatgttccatttattgctaaaaggtactccaatggtaatcggcaactcttttacattgtcgacattgatttcctgtataccatcgtttatgatagttacaatgggttcggaaactttaaatcccagtaggagggtggaacggccggggttcaacttctctcctgtagtgcttgctttgagtgggagaatgtattgaacattgtcatagccgcacaacgcatgaatctttgtcgggtcgtatacgatagtgccttttgccagtctgtcaccggcagatacgttaaccgttgtgttagtcatttgataacaatcttccggaagtatctggtaactggttccgtcggcagtattgagtgagtcgagcaggcttttgtctacggtgaaggtgacggtactgttattcagttccagtcctccgtgttgtatccataagtcagcattgtatttttctcctacattatacgattgcagaatagtcagtccgttttcagacaatgacaaaatcccttcggatgtattgctcgtatcaaaggtttcatcacaaccgataatagagagagtgatgcaacctgatattagtatataacttatttttctcataatgctcattgatttattgtgcttatacaattaccatcccggattctggacgaggttttgtgtctttctcatttcgtgatccggtattggctgtaagtacatctttctgttgaatacaattttttcagtttccactacgcggttgaactcttcggtatcattgatagttccccgaacattcataccgtgtgcatatccgttctggcgtccttcaccgtctttgtcggcaatcatccagcggcgtacatcgaaataacgttgaccttccgttgccagttcaatctgacgttcgcgctgaatggctgctctttgcaattctttattacctacgataccgggattcagtatttctactttcggcaagcctgcccgttcgcgtacgaggttcagataagtcagtacgcgtgagtcgctcggatttacttcgttggcaacttctgcatatatcagatagaaatccgccagacggaagattatggaaggacggttctgactagctacacccggactggtcttgctgattgaccggttgaagcgcttgaaaagcatatatccggttgtagtggcttgtccttcttgaacgcctgcattacctccattgtagaactggacttgtttgcaggtgacaggccattggcgtccgttgaagaagacagtgttgtagaaacgtgcttcacgattcagatagcggttactgactgttacgttggtgtagttcttagagtattttccgtcattcttatccttgtaagttccataaccatcttctttataaagtgttgatttcggcagatagtcggtttccttgataggaagtccgtcgttcatatagaaggcatctacgagttcttgcgttactccggtcgaacccaaaccgttcttttcgcagcgaggaacgattcttcggtcgaatgcgtcaccgtcaagtcctccccagtcgttgttggcggtgccccagatgatttctttattgtatttctgaaagaggttgtaaacggaggcatctacgtctagaatctgttcaccggtgctgcttgttgtatattctttatacagttcgtagcggtttccggtttctgcgtaatcgatgaaatctttgcaggcgtttaatgcagtattccatttgttgtcatcacgatccgggaagagtcttgtaccgtctgggttggtcagagacagcgcttctctgtatcccccgttgagaagggggctggctgcatatagccacaatttggcacgtacggccaaagcgacacctttggttggccatgcgcggtaagattcattttcgtgcatcggttcctgtggcagttcattagctacttcacgtagttcctgatcaatatacgtgataacttcatctaccgtatttctgggaacatcctgagtctctgtcgcctcgtataccttatcttttacgaggataataggaccgtattgttccaatagcagataattgtaaaatgcacgcatgaagcgtacgttggcacgcatctcattcagttcgtcttcttccagtctgtcgccttgcgtaccgctggttgtaatcacatgagctttctctaggaaaatgttagcctgccggatgtatttatagcagtcgccatagcggtgaaaaccagcggtcgccgcattcttgtccgagttgttggccttggcagcatttccataacctactactagttcatcgcagattgcagcccacggatttttaaaggctcctacattcaggctgtttattcccgaataatcggggattcctgcaaagacattggcataccatcgtttggtataggctacgttttcaaatatttgatctgtattttgcaagcctcctgacatctggtccgaaacagccagataatcacatgaactgacggagaagaataatcccatcagcaacatatatatgtgacttttacttttcatatttttatcttttatggtttttagaatgtgaaatcaagaccgattgtataggttcgcggcagcggatagttaagtccggcattcgcatttccggcttccggatcgaaatatttgatatgatcccatactgccaggttatatcccatcagatagatacgggcagcttcgaagccgatcttgcttaaaaatttcttaggtatctgatagccgatttctatattcttcaatcggaggaaagagccatcgcgcagccaccatgtactggcaacgcggttattagcattgttcgcattgctcttgtgcagacggggaataattacatcctggctcggattgttctctgtccagcggtttaatgcaaaggtacgatagttggactggtcgacaccccatgagaacggataccatccttcggaagtctttccacccaataatacagaagtgtttcctgctccctgaaagaagatgctggcgtagattcctttatattcggcatttaaaccgaatccgtagataatttccggagtttccggatgaccgattcctcttacacggtcataagagtcgatgattccgtctccattgacgtcggtatatttgatgtcaccgggaccaaggagtccgcctaaggttggttgtggaatttccgaacggagtttataagtcttcagaccgttagcgttagtgcttacggtaaagtcgtcttcggtataaagtcgttctgcgatgtaatagaggttatctttatcactgacacgtttgcccgtaatagcctggtaatcatactttggaggaagttcatcatattccagaattttattgcgggtgaatgtgaatgtacctcttgcgctaagttttaccttgcctatattttgatgagcgttcacagacatgtcaacacctctgttgcgaaccttaccgaagttttgccacggatcgtctctcagaccgccaagctggggaacagtctgacgttgcagcagaatctggcttctggtagaatcgaagtaatcaaagataacttcaagacggttgtcaaacaagccgatatcgaaaccgtagttttgtttgtcttctacttcccatcccaagtaaggagctgcaaaacgtccttctatgataccgttgccgataccgttcagaccgcctccggtatcattgtaaccttgcgtaaaacctccagcatccattttgtaggtcggacggtacaagaaacgggttcctcctgtattgtcgttaccggcacgtccgacagaggctcttaatttgagtttggggacatactttttgatcacttccgggtagaaagactcattggaaatgtagtaggcgagacctactgccgggaagaaaccgaaacggttgcccgaagcaaatgcttctgaaccggtgtatccgaagttgccttcaatgaaatagcgtccgccgtaaccgtaagttaaacgtcctaccagaccttgcttacgatagggaagtgctacattgtgatattgggtttccttttgcatgtacaatagcatggcacccacttcgtgctggtcgaacgtacgtttatagttgatggcagcatctatgtaaatcttcttggttgcgcttgtcgcactattcttagggtcctgcaattcagggtttccggatacgactgtggcaaataatagattgccgttttcatcgcgtcccgtagcatgatatcttgtcggattatattcacggcgaacgatcatttcactatcatagtcataacttgcgttcaggcgtacagacaaacctttggtgataaaatccagtttctggtctacataaactttggattgaatggcagtacggtattctttggcgtatccggagttcatcaataagttgtacgggttgcgcatgttagcgtcacgttcctgtgagtaggttgaaacagtaccatcactgtacacagccggaaatgtataaggaggagtaatcagcatggaacggaatatattggcagttcctgttcccggataattattaaccagatactgaagtgcgaggtcaactcctacagttgtagtgcttgatacgttcatatcaatatttgaacgaagattgatacggtcgatgccgatgtttgtattatattgtttggtaggacttcctttgaaaataccactttcgttgtaatatgctgccgaaacaaagtattttgctttttctgtacctccacgtacattcaaggtatatctgtgtgtgaatgtgtttttacgtaacattttgtcgatccagttggtatttggatataggtccggatcgtcattgttccggtaatgtgcaattaagtcatccgaaaactgcggtaattccccatcattatggagtgcttcgttgaacaggtccagatagtcggccgaaccaacgaactcgggaagacgggtgggggaagaaatggtgtgttctgtcttgaatgaaatctttgccttctctacacgtccgcgtttggtagtgacaagtactacaccattggctccctcggcaccataaatggctgttgcagcggcatccttcaaaaccgaaaacgtttcgatttcgtcgggttcaatatcactcatgcttctgggtacaccgtccacaagtaccagcggagatgtaccacccgcaaaggtacttacacctcgaatccaaaactctgcgttatcatatccgggttcacccgaacgttgtactgcaatcaaaccggcgacttgtccggcaagactgttattcaggcttcgcgaagggacaactatatcctttggtttgatggaactcatagaaacgactacgctttcctttttctgctgtccgtagccgactactacaacttcgtccagcgctttggagtcttcgttcagcatcacattgatgttgcggcgcccttttacttttatttcttcggttacgtatccaagatatgatacttgcaaaattgcattgtcggaaggaaccataatctgataacgtccttccacatcggttattgctccgacgtttgattgtccttttactacaacattagctccgatgatagattctcctttgctgtctgttactacacctgttattttaatcttattttgttgcgttgtttctgaactctctatgccattcatcggcttttctgcattgccggcatttatgagtggagaaaaacataaagaaaagaacagaacaccgattcgcgcggttgtgtgcactttgtttgaagtaaataaaatgtttttcataattttgattttaaaataataactagtttactggttttgtttgtaaacgatagagatggtaaatcataatactgtaatatttccataggcattgattgtgtgttgatttttgattaaaaattaggttgtgaaatatagaatttagtaaactctaaggcggtataagttcatggagaacttggtggaatgagtattatgagtacatattaatttcaaataccttctgaaatattactttatcagaattataaaaggaaaagatagggtaaacgaagaaataactttttaaaaaaaacatcaatttatagcgtacttctgaaaaatataactatttttgtcgccaacaaagcaaagaaaatcattcaatatttgtaaaccttaaattttcaaaagatgaaagcttatttttctaaaatctgctaccaagttctccataaacttatctgaatatatccttaatttatctattatttatctgattattaatatattgtatgtttgatcggaatgagctaaaatagtatttaacatattcctgttttgtctgtcttatccttattttacgttttgtataattatatatgtatcattattttgtaatgagcgtgtgccggtatagaaaaacttttaatgccttatttcaattaattttaagcaggttcatgggaaaaacaattttaaaaattacctttgcaatattctaagttttatctcaaataaaaagcatatgaacaaaatgagagtttttttattgtttgctgttttggttggtgtgataagtgcttgtcaatcaaagagcggacagactgcgggacaagagcaggatactatggatgatagtctggctgttgctcctacagaagatgagaaaacaatcttcggggtagtagaagatgcttcgatgaataattttatgttggttacttcgaaaggagatacagtgttcgtcagtacgatggatcaggaaccgagtgaagtcggtggcttcgaactgggagacaccgtacaggtgaattacatagaagaagaggaagagccgggatcgaatacgataccaactgcaaagaaagtgattgtagtagggaagaaggcggaccggactaatgactaattaataatctaatcagaactacagaatgaaaaagaaaatgttggcagcaactctgttgatgggtttattggctgcatgtggaggtaactctgcctcaattgttggctcatgggtagaacctgtgccgggactggaaggacaagtacaaggtattaagatggaagaaggaggcgttgcttcttctgtcaatatggctactttggtttatgaaagctggaaacaggaaggaactaaactgattctgacaggaaaaagtatcggtaatggccagacgattgaatttgtggatacgatggatatcaagagactgacggctgattctttggttctggataaccaaggaatggaaattcgttacgcaaagcagaagtaatttgtttgctgtagaattaaaaaagctactttcctgatgatttgtctttcggaaagtagcttttttatagcttttcagagatgcagcttacaaaaggtctaaagctttgaaagctttcactaacttttctacagcactgtctatttgttctttggtgtgagtagccatcaatgccacgcgtaccaatgtgtcttgcggagcacatgccggcggaataaccggattgatgaatacaccttcgtcgaaagctaacttagtaaccatgaaagtcttctccgtatcgcgtacataaagaggaatgataggagactcagtagcaccgatctcgaagcctgcttcacggaaacgtttcagagcatagttggttgcttcccacagagcgttcagtctttccggttcgttctggatgatatgaagagcttccaaagcagctgctgttgcagccggagtgttggatgcactaaagatataagtacgtgcattgtgtcgcagccagttgatgatagaagaatcagcagcgataaaaccgccgatagaggccagcgacttactgaaagtacccatgatcaagtctacttcgtgtgtcagaccgaaatggtcgcatacaccacgtccctgttttccgaatacacccaaaccgtgagcttcgtctaccataatagtagcattgtatttatgtttcaggcgaacgatttcgggtaggtttgccaagtcaccttccatagagaatacaccgtctactatgatcagtttcactgaatccggattgcacttctgaagttgcttttccagatccgccatatcgttgtgcttatattttaattgctgtgagaaggagagacgacggccatctacgatagaggcatggtcacggtcatcacatattatataatcatttcggtcggtcaggcatgagataactccggaattaaccgtaaaaccggtagagaagcaaagtgcttcatccttgccaacaaaggcagccagttctttttcaagttgaacatgaagatcgagcgtaccattcagaaaacgtgaaccggcacaaccggaaccgtatttgcgcatggctttgatacctgcttcaatcactctttcatctcccgtaaggccagtgtatgcattggacccgaacattaacacatgttgtccgcccatttctacttctgtaccctgctttccctcaatctcacggaaatatgggtaaacgccctgtgccataaatttctgtggcaggtcgtacttagctaacttctcttgtaataatcccatgaattataatttattatactcatactcagatcattcgctgatgatctaatttccttttatcttaacaagtgtttaaaacagggggcaaagataacaaaatttgcttttatctgttctttttaaaagaaaaaagttgctcccatgagattagaaacctctaatagatcaaaatttaatatatttgtattacttttgtcgtctacaattgacaaagattagcatgaacgaaagaatgaaaagaataatattcgtcgtcaatcctatttcgggaacacaaagtaaagaattgattcttaacttgctggatgaaaaaattgataaggcgagatacacttgggaagtagtgtatacggaaagagccggtcatgcagtagagatagctgccaaagctgcggaagagaaagctgacatcgttgtggctatcgggggggacggaacaattaatgaaatagctcgttcgctggtacatactgataccgcattgggaattattccctgcggatcggggaatggactggcgcggcatctgcatatacctatggaacctaagaaagcactggaagtgctcaatgagggatgcctggataccatagattatggtaagattaatggtacggactttttctgtacctgtggagtagggtttgatgcatttgtcagtttgaaatttgctcatgccggaaagcgcggactattgacttatctcgaaaagacgctgcaggaaagtcttaaatatcagcccgaaacatatgaactggaaacggaaaacggagtcagcaagtataaagctttccttattgcctgcggaaatgcgtcgcaatatggaaacaatgcatatatagctccgcaagccacattgacggatggtttgctggatgtgaccatcctcgagccttttaccgttttggatgtaccctctcttgctttccagttatttaataaaactattgatcagaacagccggatcaagacattccgttgtaagaagttgtgtattcgacgggctgtgccgggagtcgtgcattttgacggtgacccgatggagacggaggcggatgtaaatatcgaacttattaaaagcggattgcgcgtagttgtgccgaagacagaagaaaaagatgcggccaacgttcttcaaagagcacaggaatatgtgaacggaataaaactgattaacgaggcgattgtggacaatataacagataaaaacaagaaaatattgaaaaagctgacaaagaaagtctgaaataaatgccgatttctgatttattgtgtacttttgcaagctacttaacgaaaaatatcataaatattagaaaatatgttcagaacgcacacatgtggagaactgagaatctccgatgtaaataaacaaatcacgctgtctggatgggtacagcgcagccgtaaaatgggaggtatgactttcattgatcttcgcgaccgttacggtattacccagttggtttttaatgaagaaattaatgctgaactttgcgaccgtgccaataaactgggtcgtgaattcgtgattcagatcacaggaacagtgaatgaacgtttcagcaagaacgcaaacatccctaccggagatattgaaattatcgtttccgaactgaacgttctgaacactgccatgactcctccgtttacgatcgaggataatacagacggtggtgatgatatccgtatgaaataccgttatctggatttgcgtcgtaatgccgtacgctctaatctggaattacgtcataagatgacaatcgaagtacgtaagtatcttgatagtctgggttttatagaggtagaaactcctgtgctgatcggttctactccggaaggtgcacgtgacttcgtggtaccttcacgcatgaatccgggacaattctatgcacttccgcaatctccgcagacactgaaacagttactgatggtttccgggttcgaccgttatttccagattgcaaaatgtttccgtgacgaagatttgcgtgccgaccgtcaaccggaatttacacagattgactgtgaaatgagtttcgtagaacaggaagacatcatttctactttcgaaggaatggccaaacatctgttcaagactcttcggggtgttgaactgaccgaaccattccagcgtatgccttgggctgatgctatgaaatattatggcagcgacaaaccggatttgcgtttcggcatgaagttcgtcgaactgatggacatcatgaaaggtcatggtttctctgtattcgataatgccgcatacgttggcggtatctgtgcggaaggggctgctacttatacccgtaaacaactcgatgccttgactgaattcgtcaagaaaccgcagattggtgcgaaaggtatggtgtatgctcgtgtagaagcagacggtacggtgaaatcaagtgtagacaaattctatacacaggaagtgctgcaacagatgaaggaagcatttggcgctaaaccgggtgatctgattctgattctttccggcgacgacgtgatgaaaacacgtaagcaactttgtgaactccgtttggaaatgggttcccaattgggattgcgtgataagaataagtttgtttgcctttgggtgattgacttcccaatgttcgaatggagtgaggaagaaggccgtctgatggctatgcaccatccgttcacgcatccgaaagaagaagatattccattgctggatactgacccggctgctgtgcgtgctgatgcttatgatatggttgtcaacggcgtggaagtcggtggaggatctatccgtattcacgatgcccagttgcaagccagaatgttcgaaatccttggtttcacaccggagaaggcacaggctcagtttggcttcctgatgaatgccttcaagtatggtgcacctcctcacggtggtttggcatacggtcttgaccgttgggtgtctcttttcgccggtctggattctatccgtgactgtatcgcattccccaaaaataactcagggcgcgatgtaatgttggatgcaccgtctgaaattgatcagactcaacttgacgaactcaacctgatcgttgatatcaaagaaaataagtaaacgatgaacaaatatcgttctctttataataccaccctgtcactcataattaatttattattagtgatggggtgctttattctctgtcgtgtcatctttctgatagaaaatttgaaggctttttccgatctttcagccggacgaatctggagaatgttcgagggaggattcctttttgatacttctgccattctttatacgaatcttctgtatattttcctaatgctgattccgcttcattataaggaaaatgtaatatatcagaagattacaaaggggatttttgtgacaaccaacctgattgtcattattatgaacctgatggatacggtttatttccaatatacccatcgaagaacgactgcgtccgtattcagcgaatttaagaatgaagggaatctgggaggtattatagggacagaattattgaatcactggtatctgacgttgtttgccattgcttttggttatgctttatttaagttgtatcgtaagccgaagccggtaaaggtagagcgtatgccagtttattatacggttcatttgcttactttggggcttggagtgtacttgtgtatcggcggaatgcgtggcggatttaccggcatggtgcgtccaatcacaatcagcaacgccaataagtatgtagaccggccgatggagacggggatcgtactgaatacccctttttctatcttccgcacgtttggaaagacctcatttgccatacctcagtatttcgataaagagaagatggaagctttgtacacgccggtgcatatgcctgcggatagtgtgcaattcaggccgttgaatgtggttgtttttattctggagagctttagcaaagagaatagcggctttctgaatgaagaattggacaatggaacctataagggatatatgcctttccttgattcgttgatggctgaaggtctgacttttaaatattcattctctaatggtatgaagagtatcgacggaatgccttccgtattgtcgggtatcccgatgtttatagaaccgttctttctgacaccatcttctttgaacacggtatccagtataggcggggagttgggcaaaaaaggatattacaccgctttcttccacggggcggacaatggctctatgggatttgaagcttttgcacgtacggcagggtacaccaattactttggtcgtacggaatataatgaggctaatccgggtaacaaggattttgatgggcattggggaatttgggatgagaaattcttccagttctttggcaatactttatccggttttcagcagccttttgcagctgcgttgttcagcctttcttcccaccatccgtttgcagttccagcagaatacgaaggcgtttttccgaaagggaataaagctattcgtcagtgcatcggatacacggatcatgctttgaagttgttctttgaaaaggtttcgaaagaaccgtggtataaaaatacgctgttcgtatttacagcagatcataccaactcgccggaacgtccggagtatgagacggaaagcgggttgttctctgttcctgtagtgttttatcagccaggaagtaatttgaaaggtttccgtaaagatgtgatagcacaacaaattgatattatgcctactgtattggggtatttagggtatgacaaaccatttgtttcctttgggtgtgacttattgaatacgcctgctgaggatacgtatgccgtaaattatatcaatggaatatatcaattctttaaaggtgactatttattgcagtttgatggccggaacgccgtagccatgtatgcgtttaaaacggataagttgctggaacataatcttctgggtcagattgatgtgcaacagtcgatggaagatgaactgaaagcaatcattcagcagtacatgatacgaatgaataacgacgaacttgttgtgaaatgaaagaatcagtgcgcatatttcgctttatagtaatcggaacgatgaatgctttgatcatggcccttgttgtgtggctgatgatgagagaaatgttattcgaaggtgactatatggtggctaatgtaactgcgtatattatagcccagattcataactttatctggtgtaagtattggatattccccgtagaaaaaagaaagaacaatgtctggaaacagatactattcttctgttctgctttcggggttgcttacactgcgcagtttttattccttattttgttggtagaaggtctggatgttaatgaatatctggcccagttccttggattgtttatttacggagctgccaactttattgctaataagaagattactttccaataaaaaaggatataatacgggggtccacaagagttgctattcaggcttttctcttgtggacctcttgtattatttctatcggtgattaattgtgattctgctcgctaatccaaaaaacgtttggtgagtccgtcatattcatcaattcgacggtcacggagaaagggccaccagcggcggacgttctccgaacgttccatgtctatttcaactaccatgttttcaggatgatcgttgcttgcctgtgccaaaaactctccttgcggtccggctacgaaactatttccccaaaactgtatgccgttcgtttgaccggaagggtcgggctcgtgccctacacggttgacagagataaccggaagaccgtttgccactgcatgagcacgttgggagattatccacgcattgagctgacgggctttttcatcgtccgtatcgctactttcccagccgatggcggtaggataaattagaagttcagccccttttagtgccatcagacgggcagcttccgggtaccattgatcccagcataccagtactcccagtttgcctaaggatgtctgaatcggttcgaaaccgatatctccgggggtgaaataaaacttttcgtaataggcaggatcatcgggaatgtgcattttccgatattttccggcaatacttccgtcgcagtcgaaaacgacagctgtgttatgatataggcccggtgcgcgtttttcaaagagtgaagcaacaagcactaccttattagccgctgccagttcggagtagaaacctgtagatggtcctgggataggctcagcaaggtcaaacagattcgtattttctgtctggcagaaataaagtgaattgtgcaactcctgcagcacgatcagttgtgctccgtgagcagcacaggcttcaatgcttttagcgaggttcatcaggttgacccgaatatctgcggtattggattgttggattaatcctacttttatctttctcatgatgaataattatttaatatactactgaaatgtccgttattggataacacctgacggatactgcatggtgacgcaatgcagagaaccgtgttgcttgatcaatgcccggcaatcaataccgatgacctgatgtttagggaatgcttgttgtaatacttctcccgctttctggtcattatccggctgttgataggtggggtaaagaattgcatcattcataatcagaaagttggcataggtagcaggcagtcgttcaccgtcttcttctatcttgtctgccattggcaaagccagcaggcgatagggctctcctgccaatgtgcggaatgtttttaattgttcctccatggcatgcagtgcttcataatgttcgtcttcggtattgtcgcatttcacgtaggcaatggtgtcggtggaacagaagcgtgccaaggtgtcgatatgactgtcggtatcatcgccggccagataaccgtgatccagccagaggactttctgcaggtggaaagttgatttgagatattcttctatctctacttgattcagtttcccgttccggtggggggagagcaggcattcggtggtagtaagcagtgttcccataccgtcgctttcgatggaacctccttcgagaacgaagtcaagacagtctatatactggcctttcagcgctccggcttttacagcctgtccggtaatcagattatccagttcggaggcgaacttcaatccccagccgttgaatgtgaagtcgagcagggaagggttgccggtatctatcatggtgatagctccgtggtcgcgtgcccatgtgtcgtttgtctcacatttcagaaagcggacattgtccatgtttacggtagccactatctgtttctttacttcttcgggctcgggagtcacgattaataataactcacgtttggctatttctttggctatgttgacaaaacattcttgtacttctttcagcatatatgcccaatctgtaccggcatgcggccatgtcaactgtatgccgctttgcagatcccattcggcaggcaggtgaggagctctcatttctacctgtacagtcatattctttccaaagttcaattgcaaatctttttccgagccactggggctgggaagtccaaccatgattcccatcagattatattatatttagttataaaatcagtttataaaatgagcaggtaccagtcttttgacacataccttatgctttggtttcctgtttcggcttccggtcaaagaatggattctttgaagaggcgctcaccggaatagccataaccattttgcagtttttcagccaattgaggcgttgtgctgccaatccggcagagaacatgacacgggtatctacacgcatatcggctgctgtggcacaagcggagccgatggcgatgccaacgtcaatactgttcaatgcacaggggacgtcttccgtgcgtccggcacatgtcgcaaatccgcaatgtccgcaattcaaaccttgtgcctgttcgcgtgttcctatcaatacaacacattcggcactcaagatgttgtcggcatcccgaaggaaaaacttcattccgtgttcttctaccatagctatcattttgtccgacaacagtttaatatcttcatcggtaatcaaggccacttcaatgatatcaatcccttttcctttcggagcagtgcgtgcggcggtcatcatttggcgtgctacctgtaatatatgctcatgacgggcatctctttcgttcagtatcataacttttctcgaattaattagtgaggcaaagataacgtttttcaagaaaatactacctttgccggaaagaaagaattgaaaacgccatgctacatatcaacaatgcttgtatcgcttttgggacagaagtacttttttccggattaaatctgaatctggagagggggaaaaccgcctgtattgtagggcagtccggctgtggaaagacctcattgctaaatgcggtgatgggctttgtgccgttaaaggaggggaccataaaagtaggagataccttgttggataaatcaactatagatataatccggcggcaaattgcatggattccacaagaactggccttgccttttgaatgggtaaaggaaatggtggctcttccgtttgatctgaaagtaaatcgttccgttcctttttcggaagaaaggctctatgaatattttgatgatctggggctggaacatgatttgtatactaaaagggtgaatgaagtctcaggcggacaacgtcagcgtatcatgctggcagtggctgcgatgctcaacaaacctttgatcattattgatgaaccgacatcagcgttggatgccgggtcaacagacaaagtgctggctttcttcaggcggcaggcagagaaaggggcggctgtgttagctgtatcacatgataaagactttgcttcgggctgtcattatttaatagaactataaacgatatttaatactagcataaagggaatttattttgggaaccatcgatatttcatattataatttatttattggcttgctattgcttgccattccgttcttttatctttggaagttcaagacgggtttgctgaaacctgccgtgataggtacgcttcgaatgattatccagctattttttatcggtatatatctgaagtatcttttcttgtggaataatccctggattaatttcctttgggtgattatcatgatatttgttgccggacaaacagcgttggtacgtactcaactgaaacggagcatcttgctgataccgatttctataggttttttgtgcagtgtagtagtggttggattgtactttatcggtgttgtcctccagttagataacattttcagtgctcagtattttattccaatattcggcattttaatggggaatatgctttcaagtaatgtgattgcattgaatacttattatagcggactgaagcgggaacaacaattataccgttatttattaggaaatggagctacacgccaggaagctcaggcaccatttataaaacaggccatcatcaagtcattcagtcctttgattgcgaatattgcagtgatgggattggtggctctgccgggtacgatgatcggacaaattttgggaggaagcagtccgaatgtggcaatcaaatatcagatgatgattatggttattaccttcacggcttccatgctgtcactgatgattactatttcactggcttcccgaagatcatttgatgcatacgggaagttattggaagtaacgaaagaaacgaagaaatgactgttactgaccggatattccaaaatgtggcggaactgtctgttccgaattttttcattactgtagagttctcggtaatgggaaatgaaatgccggaacatatcgaatctttcgttttggaaaaatatcaagctattcttcatggcgcaaacggacgcaaatttgtctatacagaaggagggtggcgtctttttttcactttctttcctacagacaaagtggtagatgaacggtatgcactaaagaataaggtgcagatgaagtttcacaaataaatatttcttccattcaggaaagagatccggtgagttattgcatagcttgcagtttctccctcatacagcgaagctgaacgaattgttctcctgtttgtatatacccgccttccaacattcgttttgaaatttggaatttatcaagatgatggagtatgtacttttccacacctgatgattgctttttggtgaaagacaggaagtcaacctttccattttcgtgaataaatactttcgctttaatcgtacggagccccgaatctttgcaatgtttggcttctgctttatctatccaaaagatagctgtagcttttacggtatctaccatacaagtttctgtattatcaacgctcatgttttcattgattgactcatcggaattctgattctgtttcatttggcaggaaacagccagaataattactaaacagcaggatagaattgttttcatcgtgttctaattttaaggatatgcgacaaatttactaaaaaaacgataagatgggagcttattcctattttatttgctatatttgcaaccaaattttctctaaataatgaaaattaaggaaatagtaagcgcccttgaacgattcgcgcctctgccattgcaagacggttttgataatgccggcctgcaaatcggattgacagatgcggaagcaacaggggctttgttgtgtcttgacgttactgaagctatcttagatgaagctatcgcgttggggtataacctcgtcatatcgcatcatcctttgatatttaaaggttataaatccattactggcaaagattatgtggaacgctgtatgctgaaagcaataaaaaatgatattgtgatctattcagcacacactaatcttgataatgcacagggaggggtaaattataagatagccgaaaaaatcggattgaaacatctgaaagtgcttgaaccaaaagaaaatagcctgatgaagctggtgacttttgtccccattgctcaggcggatattgtaaggaacgcactttttgctgccggttgcggtaatattggtaactatgattcatgtagttacaatctggaaggggaagggacattccgtgccaaagaaggaacacatcctttctgtggagtgattggagaactccaccgggaaggagaggtgagaattgaaacaattcttcctgcattcaaaaagtcggaagtagtcagggcactattgtctgttcatccttatgaggaacctgcattcgacttgtatccgctacaaaatgagtgggcacaggcaggatcgggaatcgttggcgaactggaagagccggaaacggagatggaattcttgaaacgtataaagaaaacgtttgaagtagagtgtctgcgtcataacaaactgacagggagagaaatacagacagtggcattgtgcggaggtgccggagcatttttgcttccacaggcaatccggtcgggagccgatgtttttattacaggtgagattaagtatcatgattattttggtcacgaaggagatatcctgatggcagaaatcggtcattacgaaagcgaacaatatacaaaagaaattttttattccataatccgggatttatttcctaattttgcgctccaattgagtaaaataaatacgaatcccataaaatatttgtaagtaaaatggctagagaagcaaaaaaagatccgaatgagttgacggtggaacagaagttgaaaacactgttccagctgcaaactatgttgtctaagattgatgaaatcaagacattgagaggtgaacttccattggaagtgcaggaccttgaagatgaaatcgctggtttgagtacccgtatcgacaagatcaaagctgaagtggatgaactgaaatctgctattgcaggtaagagagtagaaattgaaacggcaaaagcttcagtagaaaaatataagtcacaacaagacaacgtccgcaacaaccgtgaatatgatttcttgacgaaggaaattgaattccagagcctggaaatcgaactttgcgaaaaaagaatcaaagaattcagtgcggacagagaagaaaaagaagctgaagtagtaaagaatgaacaaatactcagcgaaagacaaaaagacctcgaacagaagaagggcgaactggatgaaattatctctgaaactaaacaggaagaagagaagctaagagataaagccaaagatctggaaactaagattgaaccgcgtttgttgcagtcattcaaacgtatccgtaagaactcccgcaatggattgggcgttgtatatgtacaacgtgacgcgtgcggtggttgctttaacaagattccgcctcagagacagttggacatccgttcccgtaagaaagtgatcgtttgcgaatattgcggacgtattatgatcgacccggaattggctggtgtacaaattgagcataaagtagaggaagctccggctactactaccaaaagagcaatcagaagaaaaactgctgaataaggtaccatatttgaatatgtattcgaaagcctcgcattattgcggggctttttttatttcttctaactttactacccctttaaacaaacctaaccttgaattgttatcttttcatttcataaaaacctgaaccgaatatgaatgtacgagcgtggagcgtatcgctccttttgtttctttcaactgtaactgcggttggacagacagtgaaccgctatttgaatactcctcttcctaaagaatgggaagagagtggagaagtgtttcaacagactcttccggtggacgaccactggtggaagtcttttcaggacaccagactggactctttgattgctttggcagtagatcgcaattattccgtagcgatggcaattaatcgtatagctgctgcacgtgccaatctttgggcagaacgtggaaatttctttccatctatcggactgaatgctggatggacccgacaggaaaccagtggaaataccagtaccttacctcagtctacagatcattattacgatgctgcactcagtatgagttgggaaatcgatgtcttcggcagtatccgtaaacgggtaaaggcgcagaaagaaaactttgccgccagcaaagaggaatatgcggcggttatggtttctctggcatcagaggtagcctcagcttatattaacctgcgggaattgcagcaggaacttgaagtggtaaataagaatgtagcttctcaggaagaagttttgaaaatcacggaagtacggtataataccggacttgttgccaagctggatgtggcacaggccaaatccgttttatacagtactaaagcctctataccacaattagaggcaggtatcaatcaatatattacgacactggctgttttgctgggtatgtatccgcaagaaatacgtcctgtattggaaactactggaacattacctgattatatggaaccgatcggagtaggtatgccggttgatttattactgagaagaccggatgtacgaagtgcggagagaagtgtgaatgcccaagctgcattacttggcgcttccaagtccgattggctgccgaagatctttctgaaaggttcgtttggctatgcagcccgtgatttgaatgatctggtgaaaagtaaaagtatgacctatgagattgctccgtcattgagttggactatttttagtggaggacaattagtgaatgcaacaagactggctaaggcacagttggatgaatctatcaatcaatttaatcagacacttctgactgcggtacaggaaacggataacgccatgaactcctaccggaactcgatcaagcagattgtagctttgagggaagtgcgtaatcaaggtgtcgaaactctgaaactttcactggaactttataaacaagggctttctccttttcagaatgtgcttgatgcacaacggtctttgttatcttatgagaatcaactggtacaggcgcagggtagctcgttactgcaactgataagtctttataaagcgctgggaggcggttggagagaataaaagaatctataaataaaatataacctaacggatatgaaaaaactaatgtatatttttcttgtgttgtcggtattgactggttgcaaggagaaaaaagacgccggagcaatgaagggaatgccgactctggcaattagcgtagcgaaacctatagtgaaggacatcactttgacgaaagattatccgggctatctgacaacggagaaaactgtaaatcttgtggccagagtgaacggaacattacagtctgtctcttacgcaccgggcggacgggtaaaaaaagggcagttgctgtttgtaatagaacctaccttatataatgataaggtggcacaagcggaagctgaactgaaaactgctcaggcacaattggaatatgcccgtaataattatagccgtatgaaggaggctgtgaaaagtgatgctgtgagtcagatacaggtgttgcagtcggaatcgtctgtgacagaaggagtagcagctgtcagcaatgcggaagctgctttgagtacagcgcgtacaaatttaggatattgttatgttcgtgccccttttgacgggacaatcagcaagtcgacagtggatatcggcagttatgtcggcggttctttgcagccggttacgctggctactatttataaggacgatcagatgtatgcgtattttaatgttgctgataatcaatggctggagatgtcgatgaacaatcagcagccaacgaaggatcttccgaaaaagatcatggttcagctggggaaagaaggtaccgaatcctatccggcaacactggattatctgtcaccgaacgtagacctgaatacaggaactctgatggtacgtgccaattttgataatccgcagggagtactgaagagtggattgtacgtcagcattaccttaccttatggagaggccgatcatgcaattcttgtgaaagaggcttccatcggaaccgatcagctcggtaaattcctgtatgccgtcaatgattcggacatagtacactatcggcatattgaaataggacaactgattaatgataccttacggcaggtgttgggaggactctcaccacaggaacgatatgttacagaagctctgatgaaggtcagagatggaatgaagataaagccgataccctgatgcggtcggcttgttggttatcttcagacgatgcaggtaactgtttgtccttatataaatattaatcgtaaacttatatattatgttttctaagtttttcattaaccgaccaatttttgctaccgtacttgccctgctcattgtggtagccggtttggtcgcacttaatatattgcctgtggcgcaatttccggagattacacctccgacggttcaggtatcggctgtctatcccggtgcgaatgctgaaactgtagcccaaacggtaggactccccatcgaacagcaggtgaatggggtggacggtatgctctatatgtcttcaaattcttcctcttcgggagcatattctttgacaattacatttgccgtcggtacagatatcgatatggctactgtacaagtccaaaacagggtaagtgttgctcaatcatccttgccggaaccggtagtggtacagggggtgactgtgcagaaacagtcttcgaacattgtcatgttcctgacaatgacttcgaaagactctgtatacaacagtctctatctgactaactatgccaaattgaatttggtcgatcagttatcacgtgtgcctggcgtaggagctgttaatgtcatgggagcaggtgattattccatgcgtatctggctggatcctgaagccatgcgtatccggaacatttctccggcacaagtatatcagtccattcagtctcagaatatggaagtgtccgccggctatatcggtcaaccgatcggacaggacaataaaaatgcctttcaatatacacttaatgtacaggggcgacttacttctccggagcaattcgggaatattatcattcgtcgggaacaggatggggcaatgcttcgcctgaaagatattgcgcgaatagatttggggtctgcttcttatagtgtagtatcacgattgaaggggatgcctaccgcagcgattgctatctatcagcagccgggctccaattcgctggacgtttcaaaaggagtgaaggctaagatggaggaactggcgaccagttttcctacaggagtagcctataacgtaactttggatacaacggatgtaattcatgcttctattgatgaagtaatggtgacattttttgagacaacgctgctggtagtactggttattttcctgtttttgcagaactggagagcggttattattccttgtatcacaattcctgtatcgctgatcggtacattggcagttatggcggcatttggtttttcgatcaatacgctgactctgttcggattgattctggcagttgccattgtagtggatgatgctattgtggtggttgagaatgcttcaagattgctggagaccggacaatattcaactcgtgaagcagtcacaaaagctatgggggaaattacggggccgattgtcggagtggtgcttgttttgcttgccgtgtttattccgacgatgatgatcagcggtatttcggggcagttgtataagcagtttgcactgacaattgctgcttctaccgtattaagcggttttaactcactgacactgacacctgctctttgtgctctattcctcaaaaagagcaaaccgtctaacttctttatatacaaaggatttaataaagcgtatgataagacgcagggagtctacgatagtacggtgaaatggttgcttcaacgtccgcttatctcttttgtatcttttgctattctgacagtgattgccgtaatactctttatgcgttggccgtcgacatttattccggatgaagatgatggttattttattgcagttgttcagcttcctccggcagccagcctggaacgtacacaagctgtcggggataaaatcaatgctattttggattcttatccggaagtggagaattacattggaatcactggtttctccgtgatgggcggaggtgagcaaagtaactccgcaacctattttgttgtcctgaaaaactgggacgaaaggaaagggaaggagcatacggctgctgccgttgtcgaccgttttaatggcgaagcgtatatggagatacaggcaggacaagcatttgctatggttcctccggctattccaggattgggtgcttccggtggcttgcaacttcaattggaagaccggaggaatctgggaccgacagaaatgcagcaggctattgacgcattgcttgcttcttctcattccaaaccggccttagcttctgtatccagtcagtatcaggcaaatgtccctcaatattttctgaatatcgatcgtgataaggtgcaatttatgggcattgctctgaatgatgtattttctacattaagctattatatgggggcggcatacgttaatgatttcgttgaattcggtcatatttatcaggtgaagatcgaagcgcgtgatcaggcacaacgcgtcattgatgatgtcttaaaactcagtgtggctaattcggcaggagagatggtccccctttcttctttcaccaaagtggaagagcagttggggcaggatcagatcaatcgttacaatatgtattcaacagctgccctgacttgtaatgtagcgcccggaagcagttccggacaggctattcaagaaatagaaactttgtttaaagaacagctgggagatgaatttggctatgaatggacgtcagttgcctatcaggaaacgcaggcgggaaatacgaccaccattgttctggtcatggccttgattgtggcattccttgttttggctgcgcaatatgaaagctggaccagtccggtggctgccgtgataggtttgccggtggccttgttgggagcaatgataggatgtatgataatgggaactccggtcagcgtatatacacaaattggtattatcctgcttgttgcactttcggcaaagaatggtattctgattgtagagtttgcccgtgatttccgtgctgaaggaaactcaattcgtgaggctgcatacgaagcaggacacgtccgcttacgtccgattttgatgacttcttttgcttttgtattgggagtaatgcctttgctgtttgctaccggagctggtgcacagagccgtatagcgttgggtactgcggttgttttcggtatggcgatgaatactttattagcgacagtctatattcctaatttctatgaattgatgcagaaactgcaagagaagtttagcaggaagaaaaatgatgatgtgaaaaaaaatacggatatgtaaaaatagaatatcgattgcaaagccttcggagacaagaaaaagatggtgtcactatgtgcttgggatacttacactatgtatgtggtatagtgtaagtatcctgaccttatagtgacactatctttatagggcgttataatcgggaatatcctgaagaaaggtatagctctgatgggcataatccatccggcaacaataatgctgcattccattacttactatcagatagtcaactttcaataccatattatagcgggttatctgatcgaataccgcttgtgtgatctcgatgtgcggagctttgtattctacgatcattcgtgctgaaaggtctctccggtaaagcaccgtatcacatcttttagttgtgccgttcagctttaccattacttcgttggcaaggagtgcgttcggatatcctttgtgtgcaataagaaagtgaacaaagtgttgccgtacccattcttccggggtaagtgcgacatatcgtttgcgaatcacgtcgaaaattacattttttccgtttcgtacgtttattttagtgtcgaatactggtaggtttaacgataacatttattatttttgtaagttaaataacggtttccattattggaaccacaaatttaatagataattatgaaaacgaaagaagaaatcgtagctaattggctgccccgttacacaaaacgtaacctagaagattttggagagtatattctgttgactaacttcaacaagtacgtagagattttcgcaaatcagtttgatgttcctattttgggtagagatgccaatatgatttccgctacagccgaaggcattacaatgatcaatttcggtatggggagtcctaatgccgctattatcatggatttattgggagctattcatccgaaagcctgcttatttttaggtaaatgtggtggtatcgacaaaaaaaatcaaattggcgatttaattcttcccattgccgctattcgtggtgaaggaacatccaatgattattttccacctgaagttcccgctttgcctgcatttatgttgcagcgtgctgtttcttcgtccattcgtgactatggccgtgattattggacaggtaccgtctacaccaccaatcgccgtatttgggagcatgacgaagcattcaaggagtatctgaaaaagacacgtgcgatggcggttgatatggaaacggccactttgttcagctgtggctttgccaatcatattccgacaggagcattgttattggtatctgatcagcctatgactccggatggagtgaaaactgataaaagcgataatctggttaccaagaactatgtagaagagcatgttgagattggtatcgcttctctgcgtatgattattgatgcaaagaaaactgtaaaacacttgaaattcgactggtaactgccggtctttctaaaaaatatatatggcaaaacaagagctgacctgtgatgacatcctcaaagaactgagggcaaagcagtatcgtcccatctactatttgatgggagaagaatcgtattatatcgatttgattgccgattacattactgataatgtcttgaacgaaacggaaaaagagttcaacctgactgtagtgtacggtgctgatgtggatgtggcgacaatcataaatgctgcaaaacgctatcctatgatgtccgaacatcaagtggtggtagtcaaagaagcgcaagcggtccggaacatcgaagaattatcgtactatcttcagaaaccgcttcattccactattttggtgatatgccataaacatggaacattggaccgcaggaaaaagctggctgctgaggtagaaaagaccggtgttttgttcgaatccaagaagataaaagatgcccagcttccggcctttatagcttcctacatgaaaagaaaaggaatagatatggaacctaaggcaacggctatgctggctgattttgtcggctcggatttaagtcgtttgacaggtgaattagaaaagctgattatcactttgcctacgggacagaaacgtgttactcccgaacaaattgagaagaacataggtataagcaaagattataataactttgaattgcggagtgctctggttgaaaaagacattctgaaagcaaataaaataataaaatattttgaggaaaatcccaaaacgaatccaattcaaatgacattgtctttgttgtttagcttttattcaaacttgatgttagcatattatgcgcctgataaatcggagcagggtattgctaatatgctagggttaagaactacttggcaagctcgggactacgcaattgcgatgcgcaaatatagtggagtaaagacaatgcagattgttggtgaaatacgatatgccgatgcaaaatcaaaaggagtgaaaaatagttcaatgtctgacggagatattcttcgtgaattagtgtttaaaattttgcattagtaaaactgaatactctaaataaacaaaaggcatatacttttactgtaaaacagattaagtatatgccttctttatatacagtaaattagttgtgtcaaactcataaccaaatcttcttttatagacgaatattttacaatggatctgttgttctctttttcctgacttttatgaatggaaaggaatttgaagatcttttgcttctcatctttaagttcaattttggtaatttctctcttttctagtttttgaggttatgttatattcattttcaaaattgaaaaaatctgatttaattcagactataaatatagaatggcaaatcgtattagcataaatggttttgcataaatgggaaggatcatctttcttttcctgaactgataaaatgtcattttgataatttgtgggataattgggatattttgctgttatttttctagttgatcttaatttgggtattgataaaataggtgtaatttattataatacaggtgtttaattcaattttagagcttctagaattgaaaaaaaacaattgatcgactgaatgtgcggaaatataacaaggatttacgatttgcgagatacttcagaagaaaatgtaaaagaagatttgaagagttctcaatatacataagtaaataatgcattttattccttgatttattgtttttgcaactattgatatttacgtttgtgtaatcatgcctgtttgtttgtgaagtttatatctgtgaataagatacaaatgtgagcgatctagccgaatcacaaaagtatattgattgttttacagtaataatatatagtatataaatgtaataggagagtggttaacaatttgttttttatatgttatattattgtatatcatataaatatgctctaatattgaataatcgctctaaaattactgtctgagtggagcgtatttttgtgaatatcgtatttctttgttgcttgcttatgtatattctgttataaatcaatgtaatatgttattttgttaaatctggaatatcatcgtggtttatgttttattttgtgttttacaaacatattagtccaattgtaatgattgttacacatctgtaatattggcatttttatatttgtaatttgcatttgtgatttgtaatatttacctttgtatatccgtagtggttattagtatttttgtgaaaccaacgtttaatacatacaattgtaacaagaaagaagctgtatggagataaaagacagaattagaatgataatggagagagaaaaagttcctccaagagtttttgctgagacaattggagttcagcaatctactctctcacatattttgaatgatcggaataaaccaagcttggaggttgtaatgaaggtacatcagacctatagttatgtaaatcttgaatggttgctttatggtaaaggcgaaatgataacatctgcagaagatgcttctacggtttcttccaatggagattatcagccttctttgtttgatgagaatcctgtgaatccgtccaaagagacgattaatccggaaaatcgcaaggaaatggcattaagaacagccgaaaatgcacctaaagagattgtaaaacaggagattaggtacatagaaaagcctgccagaaaaatcactgaaataagaatattctttgatgataatacttatgaaacctttcgacctgaaaaatgagaggtaaaatcggtggtttgagcaaattcctgtatctttgcaccggaatacgaatttatacttttatatccatacatgaagaaatttattttagatctgacagttactgagaatatcagattgaatgcaaactatgtattgctgaaattgacttctcagtcattgctgcccgagatgttgccggggcagtttgccgaacttcgggtggacggttcatctactacatttttacgccgtcctatttctattaattttgtagacaagcgacaaaacgaagtgtggttccttattcagttgattggagacggaacaagacgtttagcagaagtaaattcgggcaatgtgatcaacgtagtacttcctttggggaatggctatacaatgcctcaaaagccttctgataagcttttgcttgtgggcggaggtgtcggaacagcccctatgttatatttaggtgaacaattggcgaaaaatggtcataaacctaccttccttttaggagctcgtagcaataaagacttgttgcagctggaagaatttgctaaatatggagaggtatatactactacagaagacggaagtcacggagaaaaaggatacgtcacccagcattctatattaaatcaggtacattttgagcagatttatacttgtggtcctaaaccgatgatgatggctgtggcaaaatatgccaaaagtaatcagatagaatgtgaagtttctttggaaaatacaatggcttgtggaattggagcatgtctctgttgtgtggaaaatacgacagaaggacatttgtgtgtatgtaaagaaggtcctgtttttaatataaataaactactatggcagatttaagtgtaaacattggtgaattgcagatgaagaacccggtgatgactgcatctggtacatttggatatggtgaagagttttcggatttcattgatatagcgcgaataggcggtattattgtaaaaggaactactcttcacaaacgtgaaggtaacccatatcctcgtatggcagagactccttccggtatgttaaacgctgtaggactgcaaaataagggagttgactactttgtggaacagatatatcctcgtataagagacattcaaacgaatatgattgtaaacgtgtcagggtctgctattgaggattatgtgaaaactgcagagatcattaatgaacttgacaaaattcctgctatagaactaaatatctcgtgccccaatgtaaagcaaggaggtatggcttttggtgtgtcagcaaaaggtgcttctgaagtagtaaaagcggtacgtgcagcttacaaaaagacacttatcgttaaactctctccgaacgttactgatatcacagaaattgcccgtgcagcagaagaaagtggtgcggatagtgtatcattaatcaatacattgctgggaatggctattgatgcggaacgtaaacgtcctattctgtcaactgtgacaggaggaatgtccggtgctgctgtgaaaccgattgccttgcgtatggtttggcaagttgcaaagtcggtaaatattcctgtcataggattgggaggtattatgaactggaaagatgctgttgagtttatgcttgccggtgcttctgcgatccagattggtacggcaaattttatagatccggccgttacaatcaaagttgaagatggtataaataattacttggaaagacacggatgtaagtcagtaaaagaaattattggtgcgcttgaggtataattgaaaacatacaataactcttcgcatataatatgaaagaaaaatgctattttactttttaagtatactgagtaaaatcaatgccggaatgatagatgaaaagaagattcccagtgcgaagagtaaaataacagatttgtctttcttatagaatataaataaaaacgacggtgaaaattctcatatttctcaccgtcgtttttatttacatatatcttttagtcttccagtaagtcagggcgaagttttttggttcgttctaaagattgctgtagctcccattcttttatttttgcttcatggccggataacaaaatatcgggtactttccagcctttatagtcagcaggacgagtatatacaggtgccgccaacagattatcctgaaaagaatcagaaagtgccgactgttcgtctgaaatcactccggggatgatacggacaattgcgtccgccatgactgctgctgccagttcgcctcctgtcagcacataatctccgatactgatttctttggtgatcaggtgttcacggatacgataatcaatacctttgaaatgtccgcaaaggataatcaggttttgggccaaagaaaggctgttggccattggctgattgaactgttctccgtcgggggtcgtaaaaatcacttcatcatagtcgcgttcagccttcagagcgttaatgcagcgttcgataggctctatcttcatgaccatgccggcgaatccgccaaaaggataatcatcgacacgacgatatttgtcttcggtataatcgcgcagattgtggatatgtatttctgcaagtcccttatcctgagctcgtttcatgatggaacaattgaagaagccttcaatcatctcgggtaaaactgttataatgtcaatacgcataatctttataatttttcgcaaaagtacaaatattcaaagataaacctgtatttttgccttaaacaatcgaagaaatatggatataaaggaaaaaatagaggaattgcgtgctgaacttcatcggcacaactataattattacgttttgaatgctcccgaaatttcagataaggagtttgatgataagatgcgtgaactccaggatctggagctggcacatccggaatataaagatgaaaattcgcctactatgcgtgtcggcagtgacattaacaagaatttcacgcaggttgcgcataaataccctatgttgtctttggcaaatacgtactctgaaagcgaagttacagatttttatgagcgtgtacgaaaagcgttgaatgaggattttgagatttgctgtgagatgaaatatgatggtacttccatttctctgacctacgaagatggaaaactggttcgtgccgttacacgcggagatggagaaaagggcgatgatgtgacagataatgtaaagacaatccgttctattccacttgtgctccgtggtgacaattatccttcttcttttgagattcgtggggaaatccttatgccctgggaagtatttgaggagttgaaccgcgaaaaagaagcacgtgaggagccgcttttcgctaatccgagaaatgcggcctcaggaacattgaagcttcagaattcttctattgtagcttctcgcaagctggatgcgtatttatattatcttttgggagataatctgccttgtgacggacattatgaaaatcttcaggaagctgcaaaatggggatttaaaatctctgatttgacgcgtaaatgccagacgttggaggaggtttttgaatttatcaattattgggatgtagaacgaaagaatctgcctgtagctactgatggaatcgtcttgaaggtaaatagtctgagacaacaaaagaatcttggttttacggcgaaatcacccagatgggcaattgcctataaatttcaggcagaacgtgcattgacacgattgaatatggtaacttatcaggtaggcagaacaggcgctgtaactcctgttgccaacttagatgctgttcagctatccggaacgattgtcaaacgtgcttcattgcataatgcggatattattgaagggcttgatttgcatatcggagatatggtttatgtagaaaaaggtggcgagatcattcctaaaattacaggagtggataaagatgcccgtagctttatgcttggtgagaaggttaggtttattaccaattgccccgaatgtggcagcaaattaattagatatgaaggcgaagctgcccattattgtcctaatgaaactgcatgtccccctcagattaaaggtaaaatagagcattttattagtcggaaagccatgaatattgatgggttgggtcctgaaacggtggatatgttctatcgtttgggattgattcataatacggcggatttgtatgaattgaaagccgatgatatcaaagggttggatcgtatgggagaaaaatctgctgagaatattattacggggattgagcagagtaagacagttccttttgaacgcgtcatctttgctttgggaattcggtttgttggcgagacggtagcaaagaaaatagccaagtcgttcggagacattgacgagctgcaacaggctgaccttgaaaagctgataagtatcgatgaaatcggggaaaaaatagcgcgaagcattcttctgtatttctcaaatgagtctaaccgagagttagttggcaggttaaaagaggctgggttacagctctatcgtacagaagaagatatgagtggatatacggataaattagccggtcagtctattgtgatcagcggcgtatttacgcatcattcacgggacgaatataaagaccttattgagaaaaatggcggtaagaatgtgggaagtatctctgctaagaccagttttatccttgccggtgacaatatggggccagccaaactggaaaaagcaaaaaaacttggagtaaccatactaagcgaggacgaatttctgaaacttatatcgtaagatatgaaaaatattcgtacttttgcgcctaataaaattagagattataattaaaactcatgatacagactaaattgaaaggaatgggggtagcactgattactcctttcaaagaggatgaaagcgttgattatgatgcgttgatgcgtttggtagactatctattgcagaataatgcggatttcttgtgtgtgctggggactacagccgaaacaccgactcttaccgaggaagagaagaaaaccatcaaaaagatggtgattgaccgcgttaacggaagaattcctattttgctgggtgtaggcggtaacaatacacgcgcaatagtagaaacattgaaaaatgacgattttacaggagttgacgctatattgtctgtagtgccatattataataagccatcgcaagagggaatttatcagcattataaagccatatcggaagctacggaacttcctatcgtgctatataatgtgccggggcgtacaggagtaaatatgactgctgagacaaccttgcgcattgcccgtaattttagtaatgtaatcgctattaaagaagcttccggtaatattactcaaatggatgacattatcaagaataaaccggataatttcaatgttatttccggtgatgacggtattacttttccattaataaccttgggagctgttggagtgatctctgtaatcggcaatgctttcccgcgtgaattcagtcgtatgacacgtttggcgcttcaaggtgattttgctaatgcactcactattcatcatcgatttactgagctatttgatcttttgtttgtggatggaaatccggcaggagtaaaatctatgctgaatgcaatggggatgattgaaaataaacttcgattgccgttggttccgactcgaattacgacatttgaggcaatacgtaaagtcttgaacgaactgaatattaaatgctgatctgatatactgagaagtatcgattctccatacattttataaataggtattcctccttcacctttttgtcatgtctcccatgaacaggcagatacaaggtgaagggggattttttagttctttctatttttttgctattagcataatttgattagctaatagcaaaatccgataacctaatagcatatttgataacctaatgtagtataaaagtgaaacgcttttccttcatcctgtatccacttgtttatagtgctttcgagcaaaaggtgaagatgaaagtgcatgtttcaacatatgttgccatgcactctttaaacttcccaatgtttgaaaataaacttcttgatgtttgaaaataactattaaagtgtttttataaaacatcctattgattgtacataattatacggtcgtttgatttaaaatatcggactgggccgaaatgaccgctcgatttagataacacaaccgcttgatttatgcaaaagttgcagtcatttgtggtaaaacgaccgtttaattttctttctcgtgatgccggatttcttcgatggaatggggtaaaaaacaaaatcctccacaaaaaatgcagaggattttggtgatcgcgacaggattcaaacctgtaaccggctgatccgtagtcagctactctattcagttgagctacgcgaccttgttaaatgttggtagaagtgaccgcgacaggattcaaacctgtaaccggctgatccgtagtcagctactctattcagttgagctacgcggccattctgtttttccgaaaaagtgatcgcgacaggattcaaacctgtaaccggctgatccgtagtcagctactctattcagttgagctacgcgaccattgtttcgttttaacgggtgcaaagatacgtacttttcccgaattagcaagcattcggcgacttttttttgtagaaaattattcgatgaaacggtaattaaacagttggaaaccgatacttaacccgacattccactcccttctcggtgagctataatgatttacataagcagagatgtctccgaacggtaattgacacacaacagaaatttctcctaaatattcgaatttagagaaggcttttccataatatgccttatttaatgagtttctttcaatcggatatataggcataaaaccataaaattcacctcgcagatggaacatttgattgaggcgatagatgggacgaatgccggctcccacaaattgattggcgcggaaagcttcattataggtgagtttgctatgtagagtaggtgaaaactcacctgcttgcatcatagtcgccgtataattctcggaaaagttcttggaagcgtacaaagcttttaaataccatcccaaaacccagtgttcgctcattgtatggtatttttctttcatatatgataattgcagccaggaatggtgttctttatttatttgaactcctttggtctcttcacctggatagaatctttcccgtcccatgaatatctgtgcaacaagagcttctttgtagccttgtgtcgggtattgccgtgaattaagtgtgcttccattgaagctgatagagccgccgaataaatcataacggcttctgtcgaatctgtctttctcaaaatcgatgatatttctctggaaatatttgtcttctattctggcgattcctattccaaattcagctcgtttacttaaaaggaacggtagccctacctgaagtttaaggaagcgttcgtctttctgattaaatgctggcttgtcatttctggaaaataacttgtctttcttaaaatagtcgaaagtagtaatagatgcgataaagcggtaagaggtcgggatcgcagtagaaaagtcgatcttagccatgaattgtgcattattatagactttcccgagttgaccgtcaaaaagaaattctttcgcatagtaatttaaatcctgatagctgagcccgagataaatttgattcgagttggacgtggaaatattcccacctaatcgtacggcaaaattattttccagtttgacttttaaatgcaggtcatacgtttcatccttcggattatatacggcgtgcgggatgatttcggaaatcatgttgtctgaaagcagccggaaatagccttctttcaagtcttcgtaagtgaattccttattgtcagagctatgaaattcttttttaatatatgcctgttgttggggattggctccgtcaataatgatgtttttgaagcgtaattccggatagttgcttcggtataccattcttctcaaacgtatattatccaaattaaccctcctttgtatacggctttttatagaatccatcatgcttatggttcggttatatccgatatcatgcaattcatctattcgctgaaaatccatcaagctgacattgtcatatttgaatgtcatcagaatacccattgaatccggaatagaatagtcggttttttgcatgaccatgttttctatctggctcatgaggtcattttccttgggtttggtggggtttgtagataccacacttccaattataatatccggatgaaaatcgtctctcataacgtctgttgggaaattattgtagatccctccgtcatatgccagcacattgtcaatctctataggcttaaacataaagggaaagctcatggaagctcggacggcatctcccaaatctccgtttctcattacgagttgctttttattgtagacatcagaagctatgcatcggaaaggaacgaacaacttgtcgaaatcgcctttacacgaagctgtagcgcgtgcatacaaatctacaaaaaccagattcatctgtatgggatttactacgcttgtgggcagaaattgtggtttgaagttttttaatgagtctttgaatgagaaacggatattaaaaaactccggtgtcgggacatttttcttgaagtggtatacgtatttctcttctatttgtccagaataccatcttttaaagtcttctgacttcaataattcttccatatcatcaggagaataccccatcgcataaagagagccgataatggctcccatggaagttcctgtaatataatcgataggaatgttattttcttctaaggcgcgaatgatgccgatgtgtgtcaatcctttggcaccgccaccacttaagacaagacctactttttgggcacagacagtcggcatgaataaccatatagcaattaacactaaaagtatttttctcataacccaaatcaaacaattgaagtatttatcatttagtgttcaaatatatacaatactttccaatttatcgatattttagcgttcgttttatgatgaaaaaagagcattgcaacacgttttagtgttgaatgctctttcattgatttatgttataaataaaggggcggtattaaatcagctcaatactgcgcttcacgaagttgttcagagcttcaccttttagcatattgttttgcaataaagccaggtcgatgagttgacggattaccttgttgttgctggcatatcctgcaaagatgccttcttttttatttttcagttcatcccattttttatccagctcattcaattcatctttctctgcagtaggaatatcttcttccttcttgtctttttggctgtcttttagttcattgcgacgcttgctgacactattcatctctgtttgtataggagctacttcagggtgacaagctgcttcttcttcgtcaagcacttgcttgataagcttatggtcggagttcagaaccagattgaacatatccggcatctctccatagaagctcattccggcctgaatatttgccatttccttcatacgacgcatatattcgctttgagtaatcatcaccggagctgaattgtctcccaatgcctgtgtcattacattgaactcaactttatccattttgggcaattggctcttgaaagcagttgtgatagcttcttgcttttctccttccaatgtctcgtttttcttgtcttctttgatgataaggttgtcgataacatcgctgtctacacgggtgaagcgagatttctcaaacttctgttccaacatacttaccatagctacatctaattgaccatccataagcagaacattgtaccccttgttggtggcagcctcgatataactgaattgttcatccttattattagcatacaaatagatcagatttccatctttgtctgtctgattatctttaataagggtctgatactcttcaaatgtataatgtttgttatctgtatcggtgaaaagggcgaatttttgcgctttctcatagaaatcctcttgagtaagcatgccgtaattgataaatattttcaaatcattccacttctcttcaaactgtttgcggtcgttcttgaaaatcgattgcaggcgatcggaaactttctttgtgatataggtagaaatcttcttcacattcgagtcgctttgcaaataagaacgggatacattcaatggaatatccggagaatcaataactccatgtaataaagtcaagaagtccggtacaattccttctacagaatccgttacatatacttggttgcaatataattgaatcttatttttattcagctcaatattgctctttactttcgggaaatagaggataccggtcagatggaacgggtaatctacattcagatgaatccaaaataatggctcgtctgacatcgggtacaacttggtatagaacgacttataatcctcgtccgacagttcgctcggcttacgagtccacaatggagtggtatcgttaataatattgtcttcagtggtttctatctgtttgccatctttccattctttcttttttccgaatgcaatggggacaggaaggaagctgcaatatttcttcagaagctcagaaacacgtgcttcttcgaggaattctttgcaatcgtcatcgatatataagatgatatctgaaccacgatctgccttatctacttcttcaatagtgaattcagggctaccatcacaagtccattttatagcttgtgcttcgtctctgtaggatttggtgataatttcaaccttttttgcaaccataaaggcagaatagaagcctaaaccgaaatgtccgatgattgcatttgcatcatctttgtatttttccagaaaatcatttgctcctgaaaatgcaatctgattaatgtacttttctatttcttctgcagtcagaccaataccacggtcggagatagtaatagtgtctttacctaattcaacgtgaattgtcagatcgcccagttcacctttaaactctccaatggaagcaagggtattcagtttctgagtggcatctactgcgttagacactaattcgcgaagaaaaatttcatggtcactgtacaagaactttttgatgatagggaaaatgttctctgttgtaaccccaatattacctttttgcataataacgtatatttttttggtttatttattagaatgtttttaattgatatttgttcagatagagacaaaaaaaatgccagaccctaaggtctgacattctggcatattttataacttatcttatttaagcaatcttctttcaagatgcaataactttcatctccaattcacctttctctttattcagagagacttgaatgacatctttttctttcagagaagaagttataatgagttctgacagtccatcctctagatgagtttgaatagctcgttttaaagggcgggctccgaattgcacgtcgtatcctttttcggccacaaatctttttgcttcatcatcaataactagcttatatccaatagattcaatacgatcatatagtccttttagctcaatatcaatgattttcgtgatagcttccaaagagagttggtcaaatgttatgatttcatcgacacgattgataaattctggcgcgaatgatttatttaatgctttttgtataacacttcgcgagaactctttatcatccagacggctttgtgtagcaaatcctacaccacgtccaaactcctttaactggcgggtgccaatattggaagtcatgataataactgtatttttaaaatcaaccattctgccataactgtcagttagacggccttcgtccatcacttgaagaaggagattgaacacatccggatgtgctttttcgatctcatcaagcaagacgatagaataaggtttgcgacgtactttttcagttaattgtccgccttcttcatatcctacatatcccggaggagctccgaccagacgtgagacagtgaatttttccataaattcgctcatgtctatacgaatcagtgcatcggaagagccgaacatatattttgccaattctttggctaaatgggttttacctacaccagtcgggcctaagaacataaaggttccaatgggcttattgggatccttcaatcccacacggcttcttaaaatagctttaaccagtttctctatagccggatcttgtgcgatcactttcgattgcagatcctccttcatgccggctagcttaattccttcggcttgcgccatacgctgtaccggaatgccggacatcatagaaataacattggcaatttcctctgcatcaacagtctgtctgttctctttcaggctgttttcccattcccgtttcatttcgtccaactgaagcgtaagctctttctccttatctcggaaactggcagcgagttcaaaattttgcgatttcacagcttcatttttcttgcttttagcttcttcgatgagtttttcctgctcttcgatttccttgggcacattgacgttggtcagatgtacacgtgatcctgcttcatccaaagcgtcaatagctttatcagggaagttacggtccgtaatataacggtctgtcaacttgacacaagcttccaatgcttcatctgtatagttcacgttatgatgatcttcatatttatccttgatgttacgcagaatctgaagagtttcggcagcagtagtgggttccaccataactttttggaaacgacgttccaaagcaccgtctttttctatattcttacggtattcatcaagggtagtagcaccaatacattgtatttcgccgcgtgccaatgcaggtttcagcatattggctgcatccattgaaccggctgcagaacctgcacctacaattgtatggatctcatcaatgaacaggatcacattcggattcctttgtaactcgttgagaatggaacgaatacgctcttcaaactgaccacggtattttgttcctgccacaactgcggtcatgtcaagagctactactcgcttatcaaacaagatgcgtgagactttcttttgaataattctcaaagctagtccttcaacgattgctgattttcctacaccaggttcaccgatcagaatcggattgttctttttgcggcgactcagaatttgagccaagcgttcaatttccttttctctgcctaccacagggtccaaacgtccttcttctgccgcttttgtcatatctgtaccgaaattgtcaagtacaggcgtgtcattggccggtttttttgaagctgtttgcgcctgttgctggcgttcttcagaaccgcttccaccagatcggggagaagacatttcttcatcatcatcgtcttccggaaatcccataccggaatttacatccggttgcaatgtggcttgttccaacactttcacgtaattaacgtcattagcttcgagcacggaagcagccatattgtttctttctcttaggatcgctaacaaaacatgctctgtatcagctatattacttttcattccacgtgcttctaaaatacacatttttaatatttttgccgcgtcattagacaacggtatctctgcatcaggcaatagcatatcatcagcttctgtcttcagccgagcttcaatctgctgctttactgcagctaaattggtgttgagttttgacaatatctcgatagcttttccttcaccgtcacgaagcattcccagaagtaggtgctcaggtccgatatgcctactcctcaaccggttagcttcttccttgctatagacgataatgtcggaaactctttgtgagaattgattattcatactttttccttttcttctaaggggttatttactggcaaatatacgtatttaatcaagtttgtattgcatatttgctttatttcttatatctacaaatggcgtgccataaaaacaatgctttgtattatatatataaggtataacaaataccactccctgtttttcacaaatatggtctccttaatggtagtatttattctttttctcatttctttttctaatattaatggttagaagtcaattcgctccttgaaatttttaattttaataactaaatatagacaaacagactgtccttcaagcagaaaaaaactttcttcggaaaaactttcgtatatcgtggaaaagtagtactttagcgtggtttttcacagaccatacaatgtataattaataatcattttaaatgcttgaacaagacagaattataaagattaacatcgaggaggaaatgaagtcatcgtacattgactactccatgtcggtcattgtttcacgtgcccttccggatgttagagatggatttaagcccgttcaccgtagaattttatacggaatgatggaattgggtaatacttcagacaaaccttataaaaaatctgcaagaatcgtgggtgaagtattgggtaagtaccatccgcatggagactcttcagtttattatgctatggtgcgtatggctcaggaatgggcaatgcgttatcctttagtagatggccaaggtaactttggttctgtagatggtgatagccccgctgccatgcgttatacggaggctcgtctaaacaagttgggtgaagcgatgatggatgacctgtataaggaaactgtagacttcgaacctaactttgataatacgttgacagagccgaaggtgatgccgacccgtattcctaatcttttggttaatggtgcttccggtattgcggtaggtatggcaactaatatgcctcctcataatctttcggaagtaattgatgcttgtgaagcatatattgataatcaggaaatcacagtagaggaactgatgacttatgtcaaagctccggatttccctacaggtggttatatatatggtatcagcggagtacgtgaaggatatctgacaggtcgtggacgtgtagtaatgcgtgcaaaagcggaaattgaaaccggacagacacatgataaaatcgtagtgactgagatcccttataatgttaataaggctgaactgatcaaatatattgctgatcttgttaatgataagagaatagaaggtatctcgaatgcaaacgacgagtctgaccgtgacggtatgcgtatcgttattgatgtaaaacgtgatgctaatgcaagcgtagtgctgaataagttgtataagatgacagccttgcagacttccttcggtgtgaataatgttgcattggttcacggacgtcctaagacattgaatctgagagatatgattaaatacttcgtagagcacaggcacgaagtagttatccgccgtactcagtttgatctgcgtaaagcaaaggaacgtgcacatatccttgaaggtttaatcattgcttctgataatattgatgaagttattcgtattattcgtgcagctaagactccaaatgatgctattgcaggtttgatagaacgttttaatctgacagaaatacagtcacgtgcaattgtagagatgcgtttgcgtcagttgactggtctgatgcaggatcagcttcatgctgaatacgaagaaatcatgaaacagattgcttatttggaaagtattttggctgatgatgaggtatgtcgtaaggtgatgaaagatgaattattggaagttaaagcgaaatatggtgacgaacgtcgttctgaaatcgtttattcttccgaagagtttaatccggaggacttctatgctgatgatcagatgattatcacaatttctcatatgggatatatcaaacgcacgccattaacagaattccgtgcgcagaatcgtggtggagtaggctctaagggaacagaaactcgtgatgcggactttgtagagcatatatatccggctactatgcacaataccatgatgttctttacacaaaaaggtaaatgttattggctgaaagtttatgagataccagaaggaacgaagaattccaaaggacgtgctatacaaaacctgttaaatatagactctgatgacagtgtaactgcatatttgcgtgttaagagcctggatgacactgaatatattaatagtcattacgtattattctgtacgaagaagggtgttatcaagaagacattgcttgaacaatattcacgcccgcgtcagaatggtgtaaatgctattacaattcgtgaggatgacagtgtaattgaagttcgaatgacgaatggtaataatgaaatcattattgctaatcgcaatggtcgggctattcgtttccatgaagctgcagttcgtgtaatgggacgtacggctacaggtgtacgtggtattacattggataatgatggtcaagatgaagtaataggaatgatatgtatcaaagatttggaaacagaatccgtaatggttgtttctgaacagggatatggtaagcgctctgaaattgaagattatcgtaagactaatcgcggtggcaagggtgtaaagaccatgaatattactgaaaaaacaggtaagttggtaacaattaagtcagtgaccgatgagaatgacttaatgattatcaataagtctggaataactatccgtctgaaagttgccgatgtccgcattatgggacgtgctactcaaggtgttcgtctgattaatcttgaaaaacgtaatgatcagattggttctgtatgtaaagtaatgacagaaagtcttgaggatgaagttcctgcagaagaagcagagggtactattgttagtgatctgactactgatcaggatgttgacaatgcagatactgctacagatgttaatgaaaataacaacgaaattgaggaatagacataatattaataattaatcaaacaacaatcatgaaaagagtattattttcaatggttttattgatggccgtaagcttatcattcgctcaaatgaagaatgtaaaagaagccaaaagcattgccagtgatgtaaaaccgaattttaatcaagctgaaaagctgattaatgaagccattaagaaccctgagaccaaggatcttcctgacacatgggacgttgctggatttattcagaaacgttttatcgaagaagaacgtgataagaaaggtgttctgaaacagccgtttgacacattgaaggcatacaacagcattttaaaaatgtttgagtattatactaaatgtgatgatctagctcaagtacctaatgaaaaaggtaaaattaaaaacaaatatagaaaagcaaatgcttcaactatattggttgaacgtcctaatttgatcaacggtggtattcaattctttaaccttgataagaataaggaagctttgcaattctttgcaacatacgtagaatcagcttcttatcctatgttggcagagcaaaatttggctaaaacagatactcttttggcacaaatagcatattacgcaacattggctgctgacagagtaggagataaagatgcaattattaaatatgctcctgctgcattggatgacaaagatggcggtaagtttgcaatgcaattgatggcagatgcatataaagctaaaggtgatactgcggcatgggttaaatcattggaagaaggtattttaaaattccctggaaatgattatttctttgcgaatttggtagattactatactagctctaaccaagcttctaaagctatggaatttgctgatagaatgttgtctactgatgccaataacaagttgtatctttatgtgaaagcatatctttatcataatatgaaagaatatgataatgctattgagttctacaagaaagctattgctgcagatcctgaatatgcagaagcatattctaatgtaggattagtgtatttgatgaaggctcaggattatgctgataaagctacaacagatatcaatgatcctaaatatgcagaggcacaagctacagtgaagaaattctatgaagaagctaagccattctacgaaaaagccagagctttgaaacctgatcaaaaagatttgtggttacaggggctttaccgtgtttactataatctgaacatgggtcctgaatttgaagaaatcgataagatgatgaaataattatattaagtcagttattataaaagactatcccaaaatttaaattgggatagtcttttttatttttacaaataaagaagcttgaatgatgattctgatttttatcaaactatataatgatgattctctttttgtgagaaaataaaaaagaggctataccaattttctattaaacataatcatcattattccctaaacgtaaacagcttattttcgttctttctcatcatccgttaataacaagcaatggcgtatcagaatggaaaatcattttacgagcaatgctcgggttaaataatcgtgcaaatatattcctcttataggaagttaatgttattatatctatctgattatctttgatatacttgtcaagtccttttaatagattatcattcattaccacatcataatgaatttcaagcccgggatattgtttttggaaatagtctttgatacctgcaagtttaatttcattccaagtatctttggattcagccagatgtattaatgagactgaaaaatggaaagatttccatgtgttgaaaaatgcttcaaaagcaatcaagtctctctgatcaaaattggttaagaaagcaatacgttttacttcattgaattctttgaatggagtattttccggaatagccaatactgctgtgcggcttcgatcaataatttcagctgttacactgccaattaagtcaatgtctttctggctttttccacgcgttcccataatgataaccttaggacgttgctccttggcatatcttaagatttcttcctccggaattccttctcgtaaaatgcaactatatttgatatccggaaattctccagatgcaactttttccttaatcttatcagatagtgcgttgagatctgaatggacctgctggatgattgttttaacagattcttcatctccgatctgataattgaatacatcgccatatggtaatgacgaagcgtatatcggtgtaaagtaaacatgtaatagaatcacttcagaattctcagttttggccaaattaaagccaaattcacacgctttcatcgaataattggagaagtcgacaggtattaaaattttgttcgatttactatctaccttaggtgtcttctctcccactatactttcagataaccaagtagaactttccgttatttttaatgcacgtggtagatcactttctttaattcgcagacgtactcctgaagatacaacaggttgtatttgatttacgttatgaatgtatgtttctattccttcattttcgaggacattctttagaatctgagcttttgtataagtcagaatagctaaggttactaatttatcttccataataatctgtttttgaaggtaaacaaataagaaatcccaattgtttgggcaattgggattcttgttttatattttaaatttgcataggttcggtagcttgttctttttgcatactcatgtttatttcatctaaaatttttagagcccggtcgagaacagttgtgtcatctagcattacaagcccgccatccggaccaggctcaagatgtattccgacactttttccttccttgaaattatggcctccgaagaagttgcgcactgtatctacgtgcaaaccaagttcgtctgctattctatgcatgctaccgctaggcaatgaatctttaatcttgcgaagttcattaaatgttattgttctcatgtctcataaatttaatggttaatactatattgtatttaattttttatcacgctataaacttaagcaaaaaaaaagataaaacaaattatttgcttatcttttttcctaaattcctaaattctgtttacgaattttatatcacttcaatagcggaagccggtacccatcctactttgccgtcttccaagcgaatttctttccattctttcattgagttatctttgatactgaccttacgtccctcatgaaggatgaacaaacttgttccactttcactcggagtgctgcgaactgttacactaggattcatgacgatcgcttcgcttctatttactaaacgttctttttgctctgaagcaaaaagattagagcatatcacaacgattaagaaaacgatacctgatataaatcctgttttttttagtataatctgcttggagaaaataaagaagtaaaaagcgatgataaatagaataaaggagacaattccccatgtagcccatgcgtctacactcatactgtttatcaaggctttggtccatgatacaaagaaaacttccggaacaggttctactttatctattgttttagcgcgtgccacttccagattggcacggatgtcgctgtttcctggtttcataagcaaagcacgttcgtagttgagtacggcttttgcaatttctccagctttgtagtaactgtttcctaaattatagtacacatccgcagattccccattttttaataaggattcatatatttggatagcagttgcataatcatcttttatatatgcggaatctccttcggcttttgttacatcttccaatttcgtatcagaaaatgtatgtgaacccgcatggatagaatcagcttcagttatttgtatagaatcaatgctctgagttccctgtccgaagcaagtaactgacattgataataatataaaaaacaatatttttttcatgacacaatctcttctgggttaatgttttattgaattttccattctgcttatcacttctattgaagaagagtagactttatccattgcctgattttcatcacctggagcgaaacgagcaaattcacaatcattcaatgcattcaggaattctttaattagttcttcacttactccatggtttctcagcttctcttcaatattgtctttcgacaaacgggaaaccggaatactgagtttgtcgctgatatatccccacaatgctttcagtacttcatcatagaaggcatctttcttgttttcagagagcaacttaccggctagtttcatgcgcttggttgctaccttattagctttctttgttttcatcttagcaacattggcatttgtagcggcttgtttgcggtagatgataaagaagatgatgaaggctaaagcaggaatgatatagaatagccaataggtcattgagccatagaagaaactacccttaggttggagagtaacttcattttgcttaatgtaacggatatcttcacccaatactttcaagtcttctttattggtgaaattggcaatcacctgatcagcatttcctgcacctttctcaacattgattacgtagtcttccgttttcaacgttttgtaagattttgaacggatatcgaaatagctgaaagatgcccccgggattttataattgcctgcatgtcttggaatagccagatattcaatgactttgtttcctgtaagaccttcctgagttaatctgacttggttgtccaccttcggatcatatacttcaaagtcatccgggaacttaatttctggattagaaatcagctttaggtttccggtgccggagattaccaacttaatggtgatagcatcattagttttcagctccttgctattaatggaagaagaaatgttgaactctcccactccacctgaaaagtttgcaggtttaccagcaggaagcggattgacattaattgctattttaggagtaacgatagatttcggtactttaactacattgcttccaccattgaaaaatgcatcaaaaggatcgtcagattgtacagctttacctaccgtcatctggaactgtgccggttctataaataacttacctggttgctggggaaataatacgaattggcgatagattgtcgtattatagttacgtcctttataatgctcctgtgtccatcttgcatttgcattcatttcaatttcttgagaatgaaatcctttaaagtcaggcagtttggcattattcaattgcaagtcatgttctctggtgtatattttataggttaagacaaatgcttcctgctcgtatacattcgttttactggcagttgctgtgataaacaaatcctggttagatacacttgtaccggatgaagagcgtgcagatgagctaccgtcattttgtcctccattactagcttggtcttgtggcaaaaccttcacctttacggagtttgaaaccatctggttgccatcagctacaatagaagctccggggattgtatattcaccggcagtatttgccatcaatatataagtgaatgtaatactacttgtagaggtgacattaccattcattatctgtgtactactttgctgagaacggcttggccccatcaggacgtcgaatcctttgatagccggtgcctgaaagtctttaactttttgtgtggttactgtataagatagcctgaattgatcccctacaaccactacatcgggagcggaagcagtgaatgacaccttgtcggcaagcgcttgggtgctatatgctatcaatgccatcaatataacaatcagttttttcattgcttatgaaatttatatcatcaactttttattattaccaatctttttccagacgaccgccctgaataactttctgttgtttcttcactttgtcctgtacgtctttctcatcctgcatcacagagttaagtaactgttcagcattttcctttgacatctgattatcttgtttttcaggcttcggcggttgttgctgatccttttggtcgtctttcttctgatcgttctgtttatctttgttttgatcctgtttctggtcttgcttctgctgctgatctttattctggtcttgattttgatcttgatcctgctgattctgttggtctttcaacatcttttgagcgagtgccaggttataccgtgtttcatgatctgcaggattgttgcgcagcgacattttgtaggcatccactgcttttgcataatctttaccagcttgaaaaagcactcccatattatggtaaatgtgtgccaatttcattttatccttttctattttgctggcagaatcatattgctccatggcttcctgaaacttttgttgttgtgagagcgtatttcccaaattgtacatggatacagcagatttaggattaacttccaaagccttgcgataattaacttctgcatctacgaatacactatcattgaacagacgatttcctttgcggatatagtcacgctctgctttctgtgccgaaacgccggcagccgataacagaaaagcagcaaacaggatatatttcatttttaacatacgcatagcttacttcttattagagaacagatgaacgtttttgaataatggattcttacgatccaaaattaacatctcagctagtaacaatagtaaaatgatccatgcaatagcctgaaactgttcgttgaaatccgtatatattttcgattccacatcagacttagccatcttacttatttcctgactgatagccttttgagcagaattagaattatctacccgtacatagataccctttccgtctttggctatttcttgacacatgccctcattcagacgggttacaattacattaccttcgcggtcacggcgataatcattggtaccttctacaggaataggagcaccttcgggcatacctactcccagcacacttacctgaatccctttttcggcagcagctttagcagcttctacagcgccaccttcatgattctcaccatccgtgatgacaatgatagcacgtcccactccttcttgcggagtaaaactgcgggttgccaggttgattgcctctccgattgctgtaccctgcttggaaatcagcgatgggctgatagattccaaaaacattttggcggaaatataatcgctcgtgatcggtagctgggtaaaagcatctccggcaaatacgatcataccgactttgtcgttatctaattcatctaccaatctggatattaatctcttggctttttccaaacggctgggctgcacatcctgcgccagcatagaattagatatatccagagctataatcacttccacccctttacgtttcaccgtttcctgcttggaaccaaattgcggacgagccagcaatactgagaataagccgatagcggcaaagatgagccaaaatttcacatccggtcgatatttagatacatccggcattaattgcgctaacaattccggatctccaaaacgtcggatatttctccgtctcctgtaattggaatacaagtagaaagctgctaaaaacggtaatagcagcaataaatataaatatgcaggttcttcaaatcgaaacatcttcttcctattttacgttacaaatcacgattgacgaaacattcctacggaattttcttgagtattgaattacgcaataaaacttccagtagtacacaaaggaaagcagccagtgcaaaccagcgatagtcttcttcccgtttgctatactcttttacgttcaactttgttttctccagcttgtcaatttcttcatatacctctttcagtttcgagttgctcgtagctctgaaatagttaccatcggtagtaccggcaatctgagtcagtgttttctcatcgatttccaccggcatattgatatactgtactgtattaccgaccggataaggatatggagccattccattcgtacccactccgatggtatacacacggataccgaaacttttggcaatctcagcggctgtcaatggcgaaatatctcctttattattggtaccatccgtcaataagatgataacttttgatttcgctttactgtctttcaggcgggttacagcatttgcaactcccataccaacagctgtaccatcttcaataaggccacatttgatattatgaatcatatccagcaatacagcatggtccacagtcagcgggcattgagtgaatgtttctccggcaaacagagtgataccaatattatcattcgggcgtccgttaataaattcggctgctacatctttagcagcttccagtctgtttggcttcaagtcttccgccagcatactggtagacacgtcgatagccagcataatatcaattccctctatttcgctgttttgccacttattagtgctttgcggacgcgctaataccacaataatcaaagccaatgcaatgacgcgcagtataaatggagcatgtagcaaataattcttataacttttaggagtatgcgcatatacccgtgcatccgaaatctgaagggtagcttcagttttctttcgcttcaagatataccatacaatataaggtataagcaataatagcaaaaacagatattcaatattggcaaaaaccattttattttcgatttaacagtttactatttagtattcacaccacattatgcaaagagatcataaagctgcatacctatatatacaaaagtacctattaatgctgctgacaagaatacaataccgcagattaataatattttagtacgcagagaacgtttctcgataattgtgatttccgttggttgcggtttctgattctcctcttccggttgctttgtttcgttgataaagtcgattgcattaatcaaattcgcatcattttcattcatttgcggatcatgcttggcaaattttactaaatcagctgtctggaagagttccttcaaatctgatattgcctctttatcattcatttccaataacttatcgatgatttcagaagaagtcatctctagtgcattgaatccgaaacgatctttaatataagtacgaagagtatctgtcaattccgtataatatgccttcggctgtcctttctgccatactttctcattcttgatacgttcgatttccttcatagcagcctgatgtggtggcaacttaggttctacttttatcttacggataatcggtttgttatcacgtatacgaatgatcagatagatcaataagccgagtaaaggcaatgcaagaaatgagcaaccgatcagcccataccagtcttcccatgcgaaaggcgctttcatcaccgttttctgtccgaagaactggtctggatgcaatgtgtcaactggcatagaatatactttcaatgccagagctttcgatctatattctttgccatccacagtgacaggcatcggcggaagataatagagagctgagtcaaacgaggtaacaatgtattcctgagtaatcagcattcgttggcgatcattcagaaattgtgtatccggtttggcggtttctataatttctacccctcgcaccagtgtatcggtataagcaggaaaaacagcacgttgtttggcgtccatcgctacttgtaattgtactttcgcctgttcgccaattaatatctgcaacgaatctatcttagcttccactgtaacagactgtgccacagttctacctatagaaagcagacataacaatgctatcagaataatatttctattcatctttgattccattaatttcgtttggcaaataaattcagcaatgcctttacgtaatcctggtcggttctcacagatacggagtcaacattacttttggtaaatgtgtcgttcagttcggtctgtttgtttatccaccagtcacggtgtgcccggcgtacagctttggaagaagtatcgatccattgttcatggccggtttccgcatcttttattcgcatcagtcccaccggaggaagatcactcactctcctatcgtaaacctgcaatgccactacgtcatgctttcggttggcaatagtcagagcgtttttaaagttatcctgatcgatgaagtcagatagaataaacgctgtacaacgtcttttcattacattagtcagatactccaatgcgagacgaatattggtacgacggctttccggttggaagtcaatcagttcgcggataatatatagaatgtgtttacgtccctttttaggaggaataaacttttctatccggtctgaaaagaagatcacaccaattttatcgttgttttgtatagcggaaaatgcaagagtagctgcaatttccgttaccatatccttcttcagttgtttaaccgtaccaaattccaaacttccggaaacatcgaccatcaacatcactgtcagttcgcgctcttcttcaaacaccttcacataaggtttgttgaatcgtgccgtcacattccagtcgatgtcgcgtatatcgtcgccgaactgatactcacggacttcagagaacgacatacctctacctttgaaagccgaatggtattggcctgcaaagatattgttagacagtcctcgtgtcttgatttcaatctgacgaactttttttaatatttcacttgtttccatttatacagtagttaaagtagtaagtagtcaggtagttaagtaaaatacacttgactaccttttactgcattgtaatattacggcagattagggcacttcaaccttgttcagaatcttgctgatgatttcgtccgaagtcatgttgttggcttccgcctcgtatgtcagtccaatacggtgacgaagaacatcatgcgcaacagcacgtacatcttccgggattacatagccgcggcgtttgatgaaagcgtatgtgcgggcagctagtgccagattgatagaagcacgcggtgagccaccaaatccgatcatgtctttcagttctttgagatcgtatttctcggggaaacgagtagcaaatacaatatctacaatataacgttctattttctcatccagataaacctggcgaaccaccttgcgggcttcgataatttcttctgctttcaggataggtttcacattgaacttctcaccgttgatattctgacggataatcagtttttcttcttccagcttcggatagtcaatcactactttcagcatgaaacggtctacctgtgcttcaggaagcgggtaagtaccttcttgttcaatcgggttctgagtggccaatactaagaaaggttccggcaacatgaatgtttccttaccaatagtaacctgacgttcttgcatggcttccagcaaggcactctgtactttggccggagcacggtttatttcatccgctaatacgaagttggcaaagataggtcctctttgtactttgaaagattcatctttctgactgtaaaccattgtaccaataacatcggccggcaataagtcgggagtgaactgaatacggctatatttcgcgtcgatcagggaagcgagtgttttgatagccaaagtttttgccagaccgggtacaccttctaaaagaacatgtccgtcggaaagcaatccgataagcagtgattcaaccaaatgtttctgaccaacaatgatttggtccatacctgtcgtaagattggtaacgaaagcactttgtctttcaatccgctcattcagttcgcggatatcaattgattcagccataaatacttaatattttattatttaattctcattaattaaggtgtaagacttaccagtgtgtaaggcttctaaattcgctcccaaaagtacgccatataattaacgattgcaactaatttttattaaaaaacaatgcgaaatctttagattaaggtactttcatacgcttttgtacttacgtaacatttcacccggctatacattgctgtatgagccgggtgaataggtgttttttgtttttattcttttgtaagttccggtatctcgattgtcgtaccgtatggtacgttatcggggttcttgattactttcgggttatgttttacgatatatggccacatggcttttgtaccgtaaaagcgtaatgaaactttcgttaaagtctctccttctttaattgtgtattttgttttggtaccggttatcttgtaggatgcggaatccaaatatgccgaagctgttggttgttgttgggcaggtttactttctgctttgacaggttccgctgtcggttccttcttgacaacaggttgcggttggactgcttccaccacagtatccttgtgtgcaattgtatctgaaagctgtgcttccggctgcacaggttgagtaacttccggtatatcaaccacattcttatcagacgaagatgagaacaaatccggataataaataaacaggatagctcctccgcacagtagtaagactataataatagttgctattaaataaggaatagctgatttttcctttttatcactgtctttatcagtataggtggccttcggttgttctatttccggctgttcttggggagttacaggctccatatttgctttatgaagctcctgggctataatttgctctgcggtaacttccgctttttctgtaataaccgttttctcttcctcctcttctgttgtttcagtctctggtttctgctcttctataattgtttcttccgattgttccttagcaggttcctctgtcaccggactgaagtcaggttccaaaacagtttccgaagattcctctacaggctcttcttctggggcttcctcagatacagattccggtttcggttcaattttcacttccggcaattcttcagcttctggttcttctgttgcaattagttccggttctgtttcaggttgaccggtttcattcgcgtcagtttcaggaacttcagccacagctactgcttcaacagtcggcacaggttcttccagttgtatttcttcctgaatatctccaccggcattttcatttcctgctatttcagagtcgatcatttcagtctctgtatcagaaaccgcaccttcctcctcatcggattcttccataggggtatcttccaataccgtaccttcatttaatactaccgtttcaaaatgtgcaaaaggcttatttattgtatctctcagattggtgtccggagtaaacgatactttggtatgaccttttatttggaaacgttcccctgtgttgacattaacgctttcccgactatctacatccacaagtttgaaagtccccaatcctttgattttcacagtcttctcattctccagggcttgttctatcaagagaaaaaactctttgacgaatgcttcggcatccttcttggtcatgctatgtttagccgccaataagtcgataaggtcttgaattgtcagtctttcattcataatgggaaatatatattatttaaacttgtctttcagtgtattgctgggtctgtacgtcaataccaatttaggaggaaccagcatacgttgcttcgtggacggattgatcgaaatgcgctccgcttttttcttcacttcaaaagaaccaaagccctgtattgcaatcgcattcccgtcttccagttcctgtgtcatgtcagacaataaagaacttatcagttcagaagtgtctttgatagtataccccagtctgtctgccagttccgatgtaaattccttattattcatacttgtttaatatctttgcatataaatcaaaatcgtccgcatcggttacttctacctgatagaattgtccgacttcaagttcttctctggaaacactgatcaatacttctgggtctacctccggtgaatcaaattccgtacgtccgatataataatctccctcgatccggtcgatgatgactttcatctgctgaccaatttttgcagcgctcaattctgcagaaataccttgctggatatccattagctcgtccagtcgggcttgtttaacctcctgtggtatagagtcttcatattgctgggcagcataagtaccctcttcttcagaataagcgaaagcccccatcctgtcgaaacgcgccttgcgtacaaattctttcagctcttcaaagtcttcttccgtttctccgggatgtcctaccatcagcgtagtgcgcagatggatacccggtacttctttacggaactgttcgatcagcttgtacgtatcttctttgcttacttgccgacgcatcagtttcaacatgttgtcactgatatgctgcaaggctatatccatatatttgcagacattatcgcgttcccgcatcacccgaaataaatccgttggaaaatgtgccggatacgcataatgcagacgaatccactctacacccggaatttccgagatacgttcgatcaattcgggcagcatttgctttttatacagatcgactccgtaatacgtcaattcctgagcgatcacctgaaactcctttaccccttgcgataccagataccggacttcatccagtatttcttccatcgacttggatatatggcgtcctgtaataatgggaatagcacaataagagcacttgcggtcacatccttctgaaatcttcagataagcataatgcttgggagtggtcaaagtacgctcaatatacaattcctcatggtacgtttttcccaagtcctgcaagagttctttccagttgaatttgccgtagaacttgtctacctgtggtatttcaatggccagttcttgtaaataacgctcggaaagacagcccattacaaacagtttcttcaagtcgccttcttcttttctttctgcaaattccagaatcatattgatagactcttctttcgcgtcaccgatgaaaccgcaggtgttgattaccgctatctccccttccggattttctgtatcatgagttacgctgtatcctgcttcttccagctgacgcatcaacagctccgagtctactaaatttttagaacaacctaaagtaataatatctattctctttcttttcatgcattctctccaaacagggaatcaacaaattcatttttgcggaagacttgcaaatcttccatgccttcacccaatccaatgtattttacaggaatcttgaactggtcggagatgccgatcactactccgcctttggcggttccgtccaacttggtgatagccattgcagtcacctccgtagccaatgtaaattgcttggcttgctcgaaagcattctgtccggtagaaccatccaataccagcaggacttcatccggtgcattgggtactaccttcttcatgacgttctttatcttggtaagctcattcatcaagcctactttattgtgtaagcggccggccgtatcgataatcactacatccgcattgttggcaacagcagaactcagtgtatcgaaagcgacagatgcagggtccgcacccattttctgttttacaacaggcacacctacgcgttcaccccagatcatcaactgctctacggcagctgcacggaatgtatcggcggcacccaaataaacagatttgcccgctttcttgaattgataagctaatttcccgattgttgttgttttacctaccccgtttactcccactaccatcattacataaggctttttcttgataggtacatcaaagtctgctacgtcatccgaattattctcggtcaaaagggcagcaatttcatcacgcagtatgtgattcaactcttgagtattcacatatttgtctgcagcggcccgtttttcgatacgtttgataatattcaaagttgtctctacccccacgtcagatgtgatcaaaacttcttccagattatccaatacttcgtcgtctactttcgacttaccagccacggcacgagcgattttactgaatacgctctctttggttttagataatcctttatctaaagtttccttcttttcctttgaaaaaaaactaaaaaatcccatatcaacagttatttgtataatacattatgctacaaagatataacaaaggattggaaaagtaaaaaaaagaagcaataaaaaatcccctcactgtttgccaatgaggggattttgtgtttatagcgttttatgctattctgattattttttgaaaaagtcttgtactttttcgtttgcaaccatttgttcatcaaaaacgtaagctccagttttcggagatttcaccattttgataaccttggtgtaagcacgaccttctttagaaccttcgtgcaaacttgctactgttttctttgccatgggttatactattattatttaatttccttatgtactgttactctcttcagaatcgggttgtatttcttcaactcaagtctttcagttgtattctttctgttcttagttgtgatatagcgagatgttcccggcattccactctctttgtgttctgtacattccagaatcacctgtactctgttaccttttgctttctttgccattgtaagttttctcctctacgtttagccgattactttaatgcttttccaatcacagaaacctttagctactgcatcgttcagtgcagcgtccagtccttttttgttgatgatacgcagaccgttagcgcaaaggctaaggctgatccaacagtcttgttctacataatagaactttttgttaaacaagttcaaatcaaaggttctttttgttcttctctttgagtgtgaaacattgttgccaatcatggctttctttccggtaatttgacaaatcttcgacatttctatcttatttttatagttttatatctatacttatttcaaacaggacgcaaagtaagcacttttatccgtataaaacaaggatttcttaaaataattcacttccagacaccaatttttccttatttgagcaaatcacgaagaattaatagcgcattattgcccgctctttcaatattcatggctcttccgcggttcgtttcctgcctgtaagtacgaatttcatttttataaccagcagcgatccagacagtgcctaccggcttctccggtgttccacctccgggaccggcaattcctgaagttgcgacagcgcagtcggttttcagcgctttcatcgctccttttaccatttcgatcacagtctgctcactgacagcgccatacacttccagtgtttccggtgaaacatggagcagattcatcttcacttcgttagaatatgccactattcctccattaaagtattccgaacttccggcaatggacgtcagacgtgccgcaatacttcctccggtgcaactttctgcggtggaaacggttaaattcttctttttcagcagttcgcctacgattacctccagtgggatatcttcttcgctgaaaatatcatcgcccagtatcgcttccagcttagcctgctcgtcgttcagtgcgctttccacttctatcttgttctgtccccgtccggttagtcgcaggcggatgattccaagtttgggcagatatgccaatttgatgctttccggcaaggctgtctcccacggttccagcttttcagcgagtatggattcggggtaatgttgtactagaaaggtccggtgcatgattacatccgtctgaaacttctcacgtagcttgggcaatacggactcagtcataacggcagtcatttcctgcggaacacccggcatggatacgagtactttattgtctttctcaaaccagctgacagaagcgcttcctaccggattgttgatgaccgtgcaatctttgggaaccattgcctgactcttattcagcgcattcatcggtattttcccggcaagcacccgctttacgttctcaaatacttcttcgctgaatatcagttcggtatggaagtatttacagagagtttgtttggtgatatcgtcttttgtgggaccgagtcctccggttaccagaacgatattcacccttttcatcgcattatctactgcttccatgatctcttcttcccgatcacggatcgaaacaatgcgtagaacttcgatacctatcttatttaattcctgccccatccaggcagaatttgtatcgactacctgccctatcagcagctcgtcaccaatggtaataacttcagcaaacatctttttcctacgttagttaatagaatatgctacctatattaataaggtatatacgctatgttaagtcattaggtttacttcattttttcgttccatatacgtgatccattcggttcatgtgcgtgagccgaatggatcacgtatgtgaactggacggcttacgcacgtggaacgaaggaatgctataaacaaagattcttaatgaaggcttcttatatcattaatcctcctttgtctccctattatatataggtgcattttgttttcagcaaggcttctttatgccaccgcctattgggtcggtgacattttttcggcgtttgccgtcactattgttattgccgtcactttaatcgtcactacttaaattattatatgacaatagtttattatataaagtgacgatgacgttaaaaaactgttttataatgtgacacgggaataagccggaagatcaatggagcagaagtctttatccagatacttgaagtatccggtaatggcaatcatggctgcattgtcggtcgtatagctgaatttaggaataaaaatattccagccatacttttcagcgtgttctcggaaagagttacgcaatccgttattggcagagactcctccggctacggctacttcttttattttatattctttggcagctttccgcagtttgtccatcagaatgtctacaacagttgcttccagagaggcggccaaatccactttatgatgctcgatgaaatcgggatcgtctttcatccagtcacgcaaggagtataggaaagaagttttcagtccgctgaaactgtagtccagccccggaatatgcggtttgctgaaagtatacgctttcggattgccttgacgtgccagtttgtcaatgatcggtccgcccggatatccgagacccatcactttagaacatttatcgattgcttctccggcagcgtcatcaatcgtctgaccgagaatttccatatcattataggcttttaccaatataatctgtgagtttcctccggataccaacaggcaaaggaacgggaatttcggttggatattttcttctccttctgctttaataaaatgagctaagacatgccctgtcagatgattaacatctatcaaaggaataccgagtgaacgtgcgaatcctttggcgaaagagacgcctacaagtaaagatcccatcaatcccggtccacgtgtgaaagctaccgcgctcagttcttctttggtaacccctgcccgtttcagtgcttcgtgtaccacaggaacgatattttgttgatgtgcccgtgaagctaattcgggtactactccgccgtatgcttcatgtacggcttgacttgataccacatttgacagcagataaccatccttgattacggctgccgacgtatcatcacaggaggattcaattcctaatattattgcactcatatgtttttaaactattaaacggtgcaaaagtaatgataaaactacgattcataacgaactattttatatttttgttcgctaaataaaagttatcgcttatcagaacgctgaaaaagactgtacgctgggtagttggtattgtactgggagtatatatcggaactattgttttgctgaatattccaaatgttcagcgagcaatgagtgtgtttatcgccaaggaattgtccgaggtgctgaatacacgcctgactatcggcaaaataaatatcggtctattaaaccgtattatcattgatgatgtgctgcttgacgaccagagcggcaaggaaatgctcaaagtaacccgcttatcggctaagtttgatatccttcctttctttaagggaaagatttccattagcagtgtccagttattcggctttaccatcaatctgaataaagagactcccgactctcctccgaattttaagttcgtattggatgcttttgcttccaaggacactgtaaaaaaggaaagttcgctggatttgcgtatcaattccgttttgattcgtcggggaaggatggcttatcatgtattgtcagaggaaaagactcccggaaagtttaatgccaagcatgtccagcttcagaatattatagccaatatttcattgaaggcgatgagcagggattctttgaatcttggtatcaagcgtctgagcttcgatgaaaaggcttccggattctctttaaagaagatgagtctgaaattggttgccaatgataaacggactaatatagagaattttgccattgagctgcccgaaacttcactgaagatggatactattcatttggtgtatgacagtctgaaggcttttgatcagttctcggagaaggtccacttttctttccgtacgttaccctcgcagattactctgaaagatatttccccttttgtacctatattggcgcatttcaaggaaccgataacgctggatatgcaggtaaaaggaacggtcgaccagcttacctgctctcatctggagattacggccgacgaccgccagttccggctatcgggggatgtatcgcttcaggaactatcgagtccgcaggatgcgtatgtgtacgggaagctttccgaactttccgccaacaatcgtggtgtcggttttttggtgcgtaatctgagcagcaattacaatggtgtacctccccttctggaacgtttgggggatattgatttccgtggagagatttccggatacttcaccgatctagttacttacggacagcttcgtaccgggcttggtaatgtaaaaaccgacttaaagttaagttccgataaggctaaggggctgtttgcttattccggtgctgtcaaaacagaagagtttgaactgggcaagttattgaataatgagaaatttggggaaatcacctttaatcttgatgtacatggacggcatatcgaaaaacagcttcctgctgtagagttgaagggattgatcgcatctgtggaatatagcagatataaatatgagaatattacgctggacggcgaatacaagcaaggcggatttaacggaaagatagcgctggatgatccgaatgggtctatttatctgaacggagatgtgaatgtgacatccaaggttcctactttcaatttccttgccgttgtcgacaagttccgtcctaatgatttaaatcttacacctgattaccaggatgcggagttctctctgaaggtaaaagctaattttaccggaggttccattgacgagatgattggagaaatcaatgtggacagtctggagttcagggcaccggacaaggaatatttcatgaagaacatgaatgtacgggctacccggcaggataatgaaaatcagcttaaactgacttctgaatttctgacggcaaacatagcgggaaaattccagtaccatactttaccggcaagtattttcaatatcatgcgtcggtatgtgccgtctttgatattgcctccgaagaaaccgatagagacgaacaataattttgcgtttgatgtacatatatataatacggacattttatctacgatatttgatgttccgttgactgtatatacacattctacgttgaaagggtattttaatgatgccttgcagcggctacgtgtggaaggctacttcccccgcctgcaatataaaaacaactttatcgagtcgggtatgatcttgtgcgagaatccttcggaccatatcagtgcgaaggtgcggctgaccagtctgaaaaagaatggagccgtgaatctttctctggaagcacaggccaaagaagataaagtcagcacgactctgaactggggaaataatgccatagcaacttatagcggaaagttggcggctgttgcacaattcctgcgtacagcaggtgaaaagcctttgctgaaagcgatggtggatgtgaaacagacagacgttatcttgaatgatacactttggcagatacatccttcgcaggtagtggtggactcgggcaaggtggatgtgaataatttctatttcagccatcatgaccgttatgtgcgtatcaatgggcggctttccgacaatccggcagataccgtaaaagtggacctgaaagacattaatatgggatacgtatttgatattgcaaacatatccgatgacgtaaactttgaaggagatgctacgggaacagcatatgccagcagcgtgttcaagaaacctgtgatgaatacccgcctcttcgtcaagaacttctcgctcaatcagggccgtttaggtgatttgaacgtatatggcgcctgggataatgagaaaagaggaatctatctggatgcttccattcaggatatatcaccgtcaccatcgcgagtcatcggtatgatctacccgttgaaaccggaaagcggactcgatctgaatatcgatgcccatgaactgaacttgaagttcctcgaattttatatgaaatcaatagcacaggatataaaaggacggggaacgggaaaagtacatttttacggaaagttcaagggattgaatctagatggggctgttatgacggatgcttccatgaagtttgatattctgaatacccactttgccgttagagatacgattcatttggctcctaccggattgaaattcaataatatgcatattgccgatatggaagggcattcgggaaccttgaacgggtatctgcgtttccagcatttcaagaatataaattaccgttttgagatacaggctaataatatgctcttgatgaatacgaaggaatcgacggatatgccattctttggaacggtatatgctacgggaaatgcgttgcttgcagggaatgcgatacagggactggacgtaaatctcgccatgacgaccaaccggaatacggtattcacctatatcaacggaaatgtggcgtcggctgccagcacccagtttataaagtttgtagataaaacgccccgtcgaaacattcaggattccattcgggtaaattcctattttgagcagatgcaacagaagcgtcaggcggacgaagaagagcatcagacagatattcgtttgaatattctagtagatgctacacccgatgccaccatgaaaattattatggaccctatagccggagactacatcagtgcgaagggaacaggaaacatacgcacggagttttataataaaggggatgtgaagatgttcggtaattaccggatcagtcagggaatatataagttcagtttgcaggaagtgattcgcaaagattttatcatcaaagatggaagtacgattactttcaacggtgctcctttggatgcgaatatggatattcaggcttcatacacggtaaattccgcttcattgaacgacttgaatccggatgtttcctccattgcccagcagactaatgtacgggtaaactgtatcatgaatctgagcgggattttactgcggccgaccattaagctgggtatcgagcttccgaatgaaagagatgaaattcagacgttggtgcgcaattatatcagtacggaagagcagatgaatatgcagattctttatctgctgggtatcggtaagttctatacggaagatgctgcacggaacaatcagaactcgaacgtgatgtcatcagtactctcttctaccctatccggtcagttgaataatgccttgtctcaggtttttgagactaataactggaatatcggtaccaatctgagcacgggtgataagggatggacggatatggaagtagaaggtatcctgtccggtcagttgctgaacaaccgcctgttggttaatggtaatttcggctatcgggacaatccgatggcgaataccaactttataggcgacttcgaagctgaatggctgatcaaccgttcgggagatattcgtctgaaggcttataatgaaacaaatgaccgttactacacaaagacaaaccttactacgcagggagtcggtatcatgtataagaaggatttcaataaatggagtgaccttttcttctggaataaatggaaactgcgcagcaagcggaaacgtgaagaagccgaaaaggtgcaacagcagcaaacagacagcattgccgatgataaagctaagtcggaactaaagagaaagcgggcacaggaataaaaataaatagtgacactataccataaccgatagtgtcactattttattttatttgagaatcgtaccgtctgtggttactttaatatctatatccggagaattatttccttccagttcaatttgataataggatgttcctgttgccatctcaaagtattcggcatcatccatctgataccctgcatactcaacgctgatggtattggtcactgcggcgggcagttcgtttctccgtacctcccatgaggtagaataccactctccgcctttatcaaacaggacttctttggaaacgttgcggttcaggccactgtcgaaatggatgatatctacttccgtaaatccaaaatcccagtcgtttttgtcatcttccacgtctacttccacgattcttgctcctgcatatttcccatcaatgaaagtcttcatggcagcgggcagttgagtggtcggaaggtgctcgttttcatgagcgtctgtgtctgcaatgcttttaatcagcactccatcaacagaataatacagatcgacttcctgattctggttttccacctcaataacgtagactgtttcgatgccttgccgctcaagtttatccacatcgtctcttctccatgtcttatagtcacttgcttcgaatgcactctttaccggatcgggcaatgcggtgtacgggatatccgtttcagtcatatgccagttgccatccgttgtgaaccatgcggatgcctcatatccatcatagaagtccgctacataatatcctgcctttgtttcccactttacgttcttgacgttaggatacttggtcgagaatgcttcttgcaatgcggtaggaacagcgattgattcatcgtcatcgttatcgcagctgtgcaggctccatgctgcacagaatgctatcagtagtgtataaattttgagtttcattgttgtcatagattttaagaaagttaattatcaatatcaatcagattaaacttcaggtcaaatttcagttctgtacggttggatagttttacttcgtaatcttttttatcacgttctatcttcagcacttttgcatccggataattagttgttacatatttctggatggcggcaggaataatggcaacaggtacggaggtgtgcttgcaatctacttcctcccagtttcccttcttgtcaaattccactttgttaccattcgtaaaaatcacttcatagcttttgtaaaggaagtcactttccatttttgccagtgccactttgctgtcagagaaatgctgtttgatgaactgttgtgctaattgtggcatttgagtcacctggataggtttatcgtcatctgcacgtgctactgtctgtaaagtgaacaagcatactaataagaatactaactttttcataatcattgtttttttaattggttttactgttatcatttaatttataatgcaaagatgagaggagaatctgaaaagatttgggaattttgggcaaaatccgaaaaaaacaaaggaaatctttcttattgtattcttttgtttcttttaacagcaactaataaattcatcgcttatttttgcaggcacaaatttgacaatattcatattaaatcaaccataagaactttcgtatgactatgagaacaaattgttttttattattaactgttttgctgggaatactccccatgagtaacacacacgctaacgactctatacctaaaagcgtgattttgtacacaccttacactaaaatctccgtttcaccgggggcgtctattgactacagcatcgacctgattaacaacacagacaagttggtgaatgccaatctttccgtcagtggcctatcaagcagctggaaacatgaaatgaaatccggtggttggaatctcagtcagttggccgtactccctaaagaaaagaagacttttaatttaaaagtagatgttcctttaaaagtaagcagaggcagctaccattttgtagtgtctgccggagaaacgcaactccctttgaatgtcgttgtggcacaacaaggtacttatcagacggagtttaccaccgaccagcccaatatgcagggaaattccaaatcaactttcacttttaatgccacattgaagaatcagactgccgatcagcaactatatgcgttgatggctaaagcacccagaggctggaatgttattttcaaacctaattataagcaggcaacttccgcacaagtagaagccaacagtagccagaatgtaagtatagacatcactcctcctgccaatgtggaagctggcagttataaaattcccgtacgtgccgctacaggcaatacttcggccgaactggaactggaagtagttgtcaccggttcttatcagatggaactgaccaccccgagaggattattaagttctgatgtgactgccggtgataccaaacgaatcgaactggaaattaaaaatacaggttcttctttattgaaagatatccaactgtctgccaacaagccggttgactgggatgtagctttcgaaccgtcaaagatagaaatgctgaaagccggagaaacggctactgttgtagccatcttgaaagcatctaagaaagcgcttccgggtgattatgtaactacgatgatggccaaaactccggaagtgaatgcagatgcacaattcagaattgccgtaaagactccgatgatttggggatgggtaggtgttctgattattctggctactatcggtgttgtctactatctgttccgtaaatatggaaggaggtaaattatgggcgaacaagtgatcgtacttaccgaattaaccaaacaatacggtaaatttactgctgtagatcatattcgcctgagtatccggaaaggagaaatcttcggtttgctgggtccgaacggtgccggaaagtcaactactattttgatgatgctgggattaacggagcccacatcgggaattgtcgagatttgtggaattaattctaccactcatcctattgaagtgaaaaggaaaatcggctatctgcccgaagatgtgggattctatgatgacatgacaggtctggaaaatctgatgtatacggcacggctgaacggtatccctgacaaggaggcgaaagtaaaagcactggagctgatgaagcgcgtagggcttgaagatcagctgaaaaagaaaaccggaaagtattcccgcggtatgagacaacgtcttggtctggccgatgtgcttattaagaatcccgaaatcattattctagatgagccgacttcgggaattgaccctgcgggtgttcaggagtttattgaactgattcgctggctgagcaaagaggaagggctgacggttttgttttcttcccaccatctggaccaggcacagaaagtatgtgacagagtaggattgttcagtaacggcaaaatacttgctctgattgatatggcagagctgaaagaaaagaaacaggaattgtctgatatttataaccattattttgaggaaggaggcgaagggcatgagtaaagtcaatcatcctttttgggttatcgtacataaggaaatatccgatcatgtcaaaagctggcgttttcttattctgatcggtatcatagcacttacttgtatgggatcgctatacacggcgcttactaatatcggtgcggctatcaaaccggatgatccggacagttcgttcctcttcttgaagttatttacagcttcggacgggactctcccctcttttgtgctgtttattaactttttaggtcctttgttgggaattgctttgggattcgatgctgtcaattcggagcagaataaggggacattgagccgtatgctgtctcagcccattcatcgtgattgtatcattaatgcgaagtttgtggctgctttgatcgtgataggtattatgctgtttgtactgggctttttggtgatgggattcggattgattgccattggcattcctcctacggctgaagaattctggagaatcgttttctttcttataacgagtatcttttatgtagccttttggttgaacttggccatcttattctcactccgtttccgtcaggctgctacttctgcgctggcttccgtagccgtttggctgtttttcagcgtattctatacgatgattgtcaatttggtggcaaagggattaagtccgtcgcagatggcgtctccttatcagattatcagttatcagaaatttattcttggattaatgcgtctggcacccagtgaattgtttaatgaagctactacaacgctgctgatgccttccgtcagaagtatcggaccgcttacgatggaacaggtacaaggggctattccgagtccgctgccgttgggacagagtctgcttgttgtttggccacagctcacggggctgattgcagcgactgttatctgttttgcaatctcatatattatgtttatgagaagggaaatccgatcccgataatcatatatgcggagtccaaatcaggtattgtcataaggtgtaatcttaggtagtaccatattaattctgccatccagcacattgtcttgctctggatggcagatgttttattaattgttttacttctagttcttgttggagatttcgaaacaatgttctccttgttcgaagtaatatcgcaagttcaactgttgcagacggcagatggaatcggttattgccagtcctaatccagtagatccttcttttttgtgtccttgatagaaacgttcaaagatgtgagtctcatccagtggttgcttctctccggaatttcggaaggtgatgctatgtttggttatgataatccggatatgtccttcgtctacgttatgtacaaacgcgttctttaacaggtttgttagtaaagcaatagccagagattcgttcatggttatatggaaattagcctgttctgttatacttacttctatgttcttgtagctgtagacttctttatagtcttccagatattgcctgaggagtacgtttaagtctacctctttggtgtcagtgaactgaccgttatctatttttgatagtagcaatagggatttgtttagtttggtgatatattctagtgtctgatgggttttcatcaactcttcaagctgtttctcggacaaagaatcgtcttccatcagcatttccaaccgattgcggcagatggcaagcggtgtctgaatttcatgtgaggcgtttccaatgaactgcttctgctgttcgaacatttgttctgtccgctctacgtaacgggtggccgcatcattcagtttgcggaattccgtgatccgtgtatcgtttttcagaggtttgtttttctttccggtctgatagctgtccaaccaatgaagtagtatatacagcggtcgcatattacgataaaatacccatacggatatgatgatgatacaaagtaacagagctacatacaggaaaataatccagacttgaatcgcacttttcaaatcatctttttcgatgctgggagtggatacggtcaattcgtaataacggtcttcgtcatctttaaagatagtggtcagaatacgtgccggttctgtttcctctttttctacaatgtataccatggagtctttatattggatatcttcccggctctttgcatattctttggttatttctttcagataatattgattattggaaccattatttttggagggaaactcctctcctgccaatgcgcggataatgattgtttccgaatagtcttccagtgaatcatccacttcatcgttgacttcgtcaatcattgtaacatagaaaaagactgcccagacagttaggataagggtcagggcgagggtgatgcgaaaaatgatataatatataagtttcatggatgatcctttctggtttcgattattctacaatcagtttatagccgaatccataaacggccttgatttcaatatttgcttctgcatccttcaattttttgcgaagatttttgatttgtgcataaatgaagtcaaagttatccacttgatcgatgtggtctccccataccgattctgccagtgtgtttttattgaccagacggccgggacgatttatgaaataaagcaggatatcatattcttttctgttcagttccagctcctgttcgttgacaaacacccggtatttgtcgggttctatccttacatttccctgacggatatagatttctccatcatgttgattccgacggatcacacttttgatccgtgcatttaattctgccagatgaaatggtttcggcaaataatcgtcagctcctaattccagtcccagtactttgtcttccagcgaatctttggcagagataataatcacattttcccgtttgtggagagctttcaaacgttcgagaaggtcaagaccgctcccgtccggcagcataatatccagtaagacacaatcatagtcgtaatcttctattttgtataatgcactgttgaagtctccagccgtttctacgacataacgttctttttccaacgaacgttggatcaattctcttaaagagggttcatcttctacaattaatatcttcataaaatcttctcctttctttattactgtctacaaagaaaagggatatttctgaaataaaactgaaatggataaaaaaagagtcagattctcaattttgaaaatctgactcttttactattgaaatagatatgtgtttttaataagaacgtgcaaaaacgacacggcaagcagaaggtttgcccgttaccatacattttcccggttctttatcaccttcaacgtacgaatcgaatgggatacaacgaatcgttgcttttgtatcctctttaatcttttcttcagtctcggttgttccgtcccaatgagccaggataaagccgccttcttcgattttctctttaaattcttcgtaagtatctactgtcgtgattttagaattgcggtaatccaatgcttttttgtagatatttgcctgaatttcttcgagcagtttttgaacgtatgtttcgatgccatcgcaagtcacagtttctttttccagtgtatcacggcgcattacttccattgtattgttttcgaggtcacgtcctcccatcaccagacgaacagggacacctttcaattcataatctgcgaatttgaagcccggacgtttgttgtccgcattgtcatatttcacagaaatgcccagtgctttcagtttggcaacaatgccttccactttcgcgtcgatttgtttcagttgctcgtcgttcttatagataggaacgattactacctgaatcggagccaaatgtggaggtaataccagaccgttatcatcggagtgagtcataatcagagcacccatcaaacgggtagaaacaccccatgaagttgcccatacatattccatcttattttccttatttacaaactgaacatcaaatgccttggcaaagttctgtccgaggaaatgagatgtaccgctttgcaatgcttttccatcctgcatcatagcttcgatggtataagtatcaagtgcaccggcaaaacgttcgttagcggattttacacctttcactaccggaacagccatgtatttctcagcaaattcgctgtatacattcagcattctgatcgcttcttcctctgcctcttcgcgtgtagcatgagcggtatgtccttcctgccacaggaattcggcagtacgcaggaaaagacgggtacgcatttcccaacggaaaacgtttgcccactgattacaaagaataggcaggtcacgataagactgaatccagtttttatatgtattccagatgattgtttctgatgtagggcgaataatcagttcctcttccaatttggcagcagggtctactactacgccagagccgtcttctgcatttttcaaacggtaatgagtcactacggcacattctttagcgaaaccttctacgtgttctgcttcgcggctcaggaatgattttggaattaataacgggaaataagcattcacgtgccctgtttccttgaacatatcgtccagttgacgttgcatcttttcccaaattgcgtatccgtaaggcttaatcaccatacatccgcgtacggcagactgttctgccaaatcagcttttaccaccaaatcgttataccactgtgagtagttttcgctacgtttggtaaggtctttcagttcttttgccattatatttttctatttaagttttcttggatgttaaaacagggtgcaaaaatacgaaaaaggaacgaactgccctattcttcttgcattattttctttataccgccttatgtgactgatttacctatttatagttactattatagtcacttttctaggactttatcgtatttatctgatacataaaatatcaagaaaatgagttaaaagaactcttgtaaaaatataaaaacagatagtcattgtctgactacctgttttataatggagcggtaagcgagactcgaactcgtgacccttagcttgggaagctaatgctctaccaactgagctactaccgcaacttgtatctttcataaaagccttatgaaatgttgatgcaaaggtaaacataatttttatatctcaaataaatttcttcaaattttagcagaggaaaatctataatataatttctattccagatgaaaaaaagaatcggatatgaaaaatcgtatattcgattgctgtacaatttaaaatatacagatagaaataaaatgattcgataaaatcctctggatttctaatcagatattttcaaaacttaatattattggatttaattcttatcaatatgcgtgattttatctgcctatactaacaataagttaatagaatggctactaactgattcaatctgaaagattaaaatgattgagatattagtcgtatccaaaacaaatgacctgttttacttgtgttttattcgttccttttaaaggagcagaacgttcctcaccgactaacgtcccgttggtttaaaaccaagtaatcgttcctttaaaaaggaaatagctcaaataacgttctttttctgtataatccgataatatatatgcaaaaacatattgaaattctgtatattattacgcgtttttatgcataatttctgctgtttgatgaaatatgtatggggctattctttgtgtaatcttaaatatagaacatttttttaagattctttctctgtttgccaaagtgaacaaacccgtcctctcatctgttagaaagtctcaattttagatttaacctaaccagcatgaaaaaaaataagatactttttgtactatgggctttgtgttttttcgtcattcagacaaatgcacagacgccgctaagtttcgaagaatcgttgcacctgcttaatcagggaaatcagagcttgaagatagctgataaggggatagagattgccaaggcagaacgtgataagctcaatgctttttggtatcctaccttgcagtctacaggtgcatttgtgcatatgtccgagaagatagaagtgaagcagccattgtctcagtttactgatccggcaaaagactttgtacattcaattattccggatgaccagataatctcagctgttctggataaaataggagccaatactcttgtctttccactaactccgagaaacttgacgactgttgatctgtcggcagaatgggtgctcttttccggaggaaaaagatttcgtgcaacaaatattggtcggacaatggtggatctggcgcgagagaatcgtgcacagactgctgcaagccagcaaaacctgttggcagaaagttattatggtctgcggttggcacaacaggtcatagcggtacgtgaagaaacatataaaggtttgcagaagcattatgaaaatgctttgaaactggaagctgccggaatgatagacaaagcaggacgactgtttgcacaagtgaatatggatgaagcaaaacgggcattggaagctgcacgaaaggaagaaacagtggtgcagagtgccttgaaagttttgttgaataaaaaagatacggatgagaatatcgttcctacttctccccttttcatgaatgattcgttaccacccaaaatgctttttgatatgtcggtcaacagcggaaactatatgcttaatcaactgcagctgcaagaacatatcgctaaacaggaagtacggattgcccaaagcggatacttgccgaatatagccctttttggaaaacagaccctctattcgcatggcattcaaagcaatttactgccgcgtaccatggtgggaattggctttacatggaatctctttgacggattggatcgggaaaagaagatccggcaatcaaaactaacccagcaaacgctggctttagggaaaatgaaagcacgcgatgatcttgctgtcggagtggataaactctatacacaattggagaaagctcaggataacgtaaaagcactgaatgcgaccatcgaactaagtgaagaactggtacgtatccgaaagaaatcctttactgaagggatggcaacttctaccgaagtgattgatgctgaaaccatgcttgccaacgtaaaagtggctcgtctggcagcatattatgaatatgatgtggcattgatgaatcttctttcactctgcggcacaccggaacaatttgtaaactatcaacctaaaccgtaacaaacaatgaaaccaactagtagaaccctttcatgggcattcgtcattattatgctggcagtcggtatttttactgctctgggaataatcttgatgcacaaacaaccgctcgtcctgcaagggcaggcagaagcgacagaaatccgtattagcgggaaacttcccggacgtatcgatacctttttggttcaggaaggtgactgggtacgccaaggagatactctcgttgtaatcaacagccccgaaatacatgccaagtatcagcaggtgaatgcattggagcaagtagccgtacagcagaataagaaaatagatgccggtacccgtcgacagattgttgctaccgcgttgcaactatggaacaaaacaaaaagtgatcttacactggctaaaacaacttataaccgtattcttaccttatataaagacagtgttgtcacttcccagcggaaagatgaagtggaagctatgtataaagctgctgttgcagccgaacgggcagcctatgaacaatatcagatggcggtagacggtgcacagaaagaagataaagaatctgccgccagtatggtgaatgctgccagaagtacggtggaagaagtttcggcactattggtcgacgcccggctgacagcacctgaaaacggtcagatagctaccatctttcctaaacgtggggaattggttgcgccgggaactcctattatgaacctggttgtcatggacgatatccatgtagtactcaatgtacgtgaggatttgatgccacaatttaagatggagggcacctttgttgcggatgtgcctgctattaataaaaaaggtattgagtttaaaatctattatatcagtccgttaggaagttttgctacttggaaatcaacgaagcagaccggaagttatgacttacgaaccttcgagattcatgcccgtcccactcagaaagttgatgacctgcgccccggtatgtccatattactgacattaaatgaatgatagaatgagttcatcacaaacatattctccttttcgttccgtgctgctcagggagtggcgacggatgacttcacgacgcctttattttggtgtgtgtatcatcctgccgctatttacccttttcttcatggcaactatcttcggcaacgggcagatggaaaacattcccatcggtattgtcgatcaggacaatactgcctcttcacgagcaatcgcccgaaatatatctgctgtgccaacatttaaagtgacaaggcattttgtgaatgaggaagctgcccgaaaggccgtacagaagaaggaaatttatggctatctctccattcctccaaaatttgagcaagatgctatttcgggaaagaatgcgactctctcctattattatcattatgcgttgctttcggtaggcggcgaattgatggctgctttcgaaacgtcgctggctcctgtgtcgctctctcccattgtgatgcaagctgtcgctctcggagtggaacaagacaagatcactacattcctgttgcccgtacaagccagcaatcaccctatatacaatccaagtctggattattcggtttatctgagccaaccgtttttcttcgtcttgtttcaggtattgattttactcattactgtatatgcagtcggaattgagattaaatttcgcactgccgatgaatggctgtttgttgccaaaggaaatatggtaacggctgttttgggaaaactactcccttacactattatctttattctgataggatggctggcaaattatgtgatgtttggcattctgcatattccttttcaaggaagctggttattgatgaatatgctgacagcgctttttgtcgtggcaacgcaggcattgggattattcctattttcactatttccggctatctctctcatcataagtattgtttccatggtcggctctttgggagctactttatccggtgtcacttttccggtgaccaatatgtatcctttggtacgagatgcctcctatctttttcctgtccggcattttacagaaatgatgcaaaatatgctctacggagggagtggttttatctacctttggccatcggttgtgatactatgtatctttccgttgctggcttttgtgttgcttcctcatctgaaacgtgccatagaaagtcataaatatgaaaaaattaaataagttacaacagttatcgttcatcatccgacgtgaatattgggctatcagtaccagctatgctgtattactggtactgatgggtggaatcttcgtgtacggattactctataattatatgtatgcccccaatattgtaacggatgtcccggttgccgtagtcgataactcacatagcgagttgagccgtaatttcatccgctggctggatgctacgcctcaagcggaaatttatgatcaggctatggattatcacgaagctaaggaatggatgaaagctggaaaagtacaaggtattttatatctccctcatgattttgaggaacgggtatttcgtggagatgaagctgtgttttctctgtatgccactaccgatgcttttctctattttgaagccttacaaggagcttcttcacgtgtgatgctggctatcaatgacaaatatcgtccggacggagcagtctttctgcctcctcagggattattggcggtagctatggcaaagcctgtaaatgtagcgggaactgcactctataactatacggaaggatatgggtcttatctgattccggccgttatggtcattattatttttcagacattactgatggtcataggtatgctgaccggagaagaacatatgacaaaaggtatccttgcctatactcctttcggaaaaagctgggcagtcgctatacgtattgtagcagggaaaacgtttgtctactgtagtttgtatgctgttttttcattctttctattagggttgcttcctcatttctttagtattcccaatattggaaacggattgtatattgtattgatgatgatcccctacttgctggcgacttcttttctggggctggcagcctcccgatatttcactgattcggaagcaccattgcttatgattgcatttttctcggtaggactgatttttctttccggtgtttcctatccgatggagctaatgccttggtattggaaagctgctcattatatttttccggcagcacctgctacacttgcctttgtgaagttgaactcaatgggggcaagtatggctgatatccaacttgaatacattaccttatggattcaggtgattgtttattttgcattaagtatatgggtttataaacgaaaactcagttgacagatatacttttagttgcagattttaaacaataattactcaaaactataatatttcagccaacgaataattaactatggaaataaaatgttttttgttgaacattttacttgattatctcgtccttttttatttattttgttaactattatttggagataggctatagtactactttaaatgtaaacatctatatgaggaatattatactatttttatttttgttgccgttgatggcatatggacaaacatacaaatatattggagtagaggatggtttaagtaaccggagaatatacaatattcagaaagatcgtcagggatatatgtggtttctcaccaacgaaggtatggaccgatacaacggtcaggatataaaacactataaattaattgaagcaaacagggagctaaattcggacatagatctcggatggctgtatgcagataaaaaagggggaatatgggtgattggaagaaaaggacgtatctttcagtatgaagagaaatatgaccgttttaagatgatttacaaattgccggaagccactgatgttatcagctacggttatttggatcgtaacagtaatatttggttgtgcagcaatgattctatcttgttgtataatacggaaacagcacagactttacagtttcctaatgtattggatgagaatatcacagtagtagaacaggcggatgatactcatttctttgtggcaacagaaatgggggtccggtatactcagttaaataaaggagctttgcatattattccttttgaaacgcttgataatgtctatacgcaaataaacgggctttattatcaccgacaacttcaaaggctctttattggtactttcagtgatggtacttttgcttatgatatgtcaactcaacaaattatcaagccagatactgctttgggtgatgtaagtatcactcatatcagaccgctgaatgaaaaggaacttttagttgccacagagggaatgggagtacacaaaatagatgtaaatacctgtaaaacttctccatacattgtagcaaactatgaaagttataatgaaatgaatggaaataacattacggatatttatattgataaagaaaaacgaatctggcttgccaattatccggcagggattacggtagtcgatccccgttataagaattatcattggataaaacattctatcggtaataaacagtctattgtcaatgatcaggttcatgcggtcattgaagatagtgaaggtgacttatggtttggaacaagcaatgggatcagtttccatgattccaaaacaggtcaatggcattctttcttaagttcttttgataagcaactgaaagacaaaaatcatattttcatcactttgtgtgaagtttcgccgggcattatctgggcaggaggatatacgtcgggcatttataagattaataagaagacattggctgtagagtatttctcgcctttcctgcttagttctgtcaacatacgaccagataaatatatacgggatatgattaaagattcaaaagggtatatatggtcgggaggatattacaatctaaagtgtattgatccgagaaagaatactgtccgtctgtatcctggagtaaatactgttacagctattgaggaaaaggatatcaattctatgtgggtgggaactgccacaggactatttctgcttgatcgaaactctggtgagtatcagtatattttaatgcctgtggagtcgacttacatcaatacgctttatcaggcaaatgatggatcactgtacatcggtacaaatggttcgggagtacttatatataatcctaaaaataggagtttcgaacactattatgccgataattcggcacttgtttccaataatatctatactattcttccggaaatggatggacagataatgatgagtacggaaagcggaatcaccagcttttctacggagaaaagatcattccacaactggagtcgagagcaaggaatgatgtcggcctgtttcaacgctacttccggcgttttacgcaaaaataaaagttttgttttcggaagcgttgatggtgctgttgaatttcccgcaggtatcaagttaccggattatgaatactcaaaaatgatattcagcgattttcatatttcttatcagcctatttatccgggggataaggactctcctctggagaaagatattgataaaacagatgtattgaagctgaaatacggtcagaataccttttcattccgggtttcttctatcaattatgattttccttcccattctgtatattattggagactggaaggttcttcatataatgaatgggtgcaattgaacagtaatagtctgattcgtttcaccaatttaagccctggcaactataaactttatgtgcgtgctatatccaaagaagagcctagtattgttttcgaagaacggcaggtcgaaataataatagcgcagcctgtatggtttagcggatgggctatattcatttatatacttgtgattgcgtttctattcggtattgctttccggattatgattctgaaaaagcagaaaaagatatcagatgaaaagacacatttctttataaacactgctcatgatatccgtactcctcttactttgataaaggctcctttagaagaatttgttgaagaggaaacattgacagagatcggttcgcagcgtataaacacggcattgagaaatgtaaatgcccttttacggctgagtactaacttaattaatttcgagcgggctgatgtttattcttctgaattgcatatttccgaatatgaactgaatacgtatatgaatgaaatctataatagtttttgttcgtatgctaacatcaagcatattgactttacatacaaaagtgactttaattatctgaatgtatggttcgataaagataagatggattctatcttaaagaatctggtatccaacgcgttgaaatatacacctgaaaatggaatggtcagcatatttgtttctgagactaaagaatcctggaggctggaagtcaaagatacgggaataggcattccggcaaacgaacagaacaaattacttaagatgcactttcggggtacgaatgctattaacgcaaagataactggtagtggaatcggactaaaactagttggaaaattagtgagtcttcatagtggtaagataaatatagagagcattgaacaacaaggtaccactatcactattgttttcccgaagggtaataagcatttccgtcattcgaatctgatagatccggagaaacccggcagacaggaagtagtattggatgctccaattatatccgaagcggctgtaaagacaaacgatgagaatctgcaacgtattcttattgttgaggataatgatgaactacgcgcttatctggtcaattcattattaccaatgtataatgtgcaggcttgcggtaatggtaaggaagcattgatcattgcaaaagaattttggccagagcttattctttccgacattatgatgccggaaatgcggggtgatgaactgtgtattgccattaaaaatgatatagaaacatctcatattccggtattgttactcactgctttaggagaagagcagaatatattggatgggcttcatattggcgctgatgaatatattgtaaaaccattcagcgtaagaattctgaaagcaagtgttgctaatttattggcaaaccgtgcactgttgcgtagcagatatgccaatctggaaatagaagataccaaagtcatgacaccattggcgaatggaatgaatagccttgattggaaatttatatcggatgtgaagaagagtattgaggataatattgataatgccgctttttccgttgaagtgctcaatgatttgcatggtatgagtcgcaccagcttttattgtaaactgaaagcactgacagatctctctccccaagagcttataaaatcagtccgtttgaaacgtgctgtacagttgctaaaagaaggcaagcataatattactgaagtttcagaactatgtggattttcagagtccaaatatttccgacaagtattcaagaaagaatataaaatgagtccaagccagtatgctaaggaatatggtacttcttccgctattattgaagatgatacctctcaggacgattcggataaataaaataagtatagataagaggtagcttttcccttgtagaagaagctacctcttatctattcaataaataggaatattatttgcatatcaagtatttaataaacaaataacctcctaatacttgcaggcacattccgggaataccgatgcggaaatcctgaacagttttgtagaaatttcctatatacatccactctcccaatgtgccgatgatctgataaaacaagactactcctgctaatacagggatagaaatgcgtccgaagcgttgcgcagcccatccggcggcgattgctaataatacggatttcaatagaatggcaggcaatactgcgggcactggcataccaaagagcaaagaatttatgactggagacaagatagcagttagcaaaccgaccttccagccatatttgtaagcaccgatcagagtgaagaaataaataggcagccaggttaatccacctagtggaatgagatgaaagagtctgggaaaaaggatattgccaacgatgaataacgaggttgctaaataggtcttcacattactgtaattcagtgaatagagttttactgttgtttccatatctttattcttttagaaattcaaattaataccacccataaatgttgccttgggcatgggataccctgtatttatttcgtaacgttgtgccaacaggttttcacctttcacaaagatgttggcaaaattacaaatacgataacttcctcgcagattccataaaacaaaacgatcctgttgctcggtgcctttattattaacgattacagaagtgtaaagtcctttaatatattgcattcctgtcgatacagtccagcgacctgcggtatagtctgctccgacatacaatttgtgttcaggagcggcgagaaccgggttttccatgtgcaaccaactatagttggcattcacattccaatgagaattaaaccgataaccgatattcgcttcaattccccagttttctatttctccggaattgacgttcagcggaggtatcaagccattgctcataataatattgtcaccgttaatataatacaggttcagtccgtaatataaggctccttccaataatcgttgagaataggaaagttcataactgaccagtttctccgggttcagttccggattggcaggagcaaacatatacatctcccgaatggtagggttgcgatatcctttgctcatcatcgctttgagttctgcgcttttgggaagatgaaaagccagtcctccctgtggaatccattcagtacctacatgagagtgatgatctacacgaacacccgcatccaatgacaaccagctatttatatcttggcggaaatcgacatatcctgcaaattcatccatttgcttgtctactcccagtttccgctctccggtagccaagactttgttccatgatttgcctccgaagtgctgatagtcaaatcctatcgtcaaacgattgcctgtgaagaacgtagcgctctgataccaggaaatgccgaacatcttgtctttagaattaaagtgtgatgtttgcggctgttctcctgttttatatccgtcattgattttatgccgtccccaattatagaaaaagctcaaagctcctgatgtcttctcataatggttttccaaggcaagcgaggtcataccacgtgtaatacgcgaatcattgtcgataagtggaacttgtatcgttcccggattggaagcattgaaatgggttacatttacatctccccagaatttccaggaagagctgaaatcatatcctaattttgcgtatcctccatattgttcaaactccatatcggggcggtgtccgtccgtacgattgtaagaaccggtaacgatactgctgaaacgtcctttctttacacggttggaaaattccgtctgcaaagtgttgtatgagccataccctacctgcatattcgttcttactccctcatcttgctgtttgcgggtgactatattgattactccgcccattgcattcgagccatagagtacagaggcagggccgcgcaagacttccactttctctgtcaacatagactgatatgcatccgcaatcggatgtcccatcaatcccatatattgcggatgtccatcgatcaaaaccaataaacctgctgtcgggctgcctccgataccacgcagactcatgccacctgccgcacctgtggatacaccatatcccatgataccacggctggtagtaaagaatccgggaacctgttccgtcaatagcggcaaaagtgaaggttcatatcttttctctatttgttgccttcctactactgaaatagtcatgggaaggtgacgaatatccgtctcgttccgtgttccggtaactacgacttcgtcaatagtatagtttcttttgacttgtgtgctgtcttttccgggttgtgccattcctgaaatggaaagcaggctgccgaacaaaaacaaacaaactgtatttgttttcatcctcaaatccgcaactaagcccttgaacgtccttattgcgtttacacgtcctctcattactgaatttgcagataatttgaacttgaagcacccacttctgcctacaatatccccttaccccacaatgtgacttgaggcaatacacaatatcattcccataagttgtaggcattatccaaaatcagtctggaaaacatctgcgtaagcattattacaggtatagatgttcagcacataccgccttgatgtcctgatccacttggctggtacagagataaacctgaagacaaacgcttttatgcgacttgttgcattgagcccgaacttctttacgtcaagtctttgaataatggccttgtaaaagttacggataagtgctgtaagaagaaggaacactgtgttctctgccatgaaggatttgggcaatctgtcccacccgaaaccattgttcatatcatcgaagatacgttcctttcctccacgaaggttatagaactcgacaatttctcttacggaagaatcatagtcgttagtcaggatacaacggtatgtgtattctccttcccaaaaatcctgcacaccatccatccgtttctgtctttgaatcacaagtcgatatgccttacctttccacttctcaacaaggatagagttcaattcaaactcaatgccattgatttcctcagttttccagcctttgagagcaaaggtgtcattgtagatcgaactgcagcggttagcacggatatagaaggacttgcagtgtttttctatttcctccacgatttcctcggaacatgatccacaatcagctctgaagcgattgatagtgagcccattctgttcaaatctcgcaaagaacctcttcagcgtgtccttctgatggaaacgaacatttgtgttaccatcgctattctctataccgactatcaaatcgccaataaccgccacgccagggcgataaccaaggaacttcttgtatgtaggctttgcatcatacttctctgtctctatgaactgatggtcgaaatcaacatcatacatctcaccctctttcagttggccagatgcaaatatacaattgagcaataaagtattgagagtgtcagccgtattgaaatcgtaggtcttgcccatatctgatgtgtatgaaatgttttcttgcgtcaactcctttatcgccctgaggatagtatcagagctacaagtgcgaagtgtcggatgaagcgagaggtggttcatcaaatgagtagtgacatcctcaatacatgaaccgctacagaagtagatactcatgagagaacggatgatttcgctgtactgataaccgaacgatctacaccttagaccgagggttgagtcgattacagatgataatgtggagtcaaattgctccatgattgaaaataatcccccaaaaggagtgagtctctcagatttaatttgtatcttcgccatgtctatcgtcggattctcttgttttttttgcaacactaagataagtgaaaattctgacatggcaaaatcctgagcaactttttgttgctcaggtacttaaaaagtttaatttataatagtgttgcggaattaaggttcatattctgtttcgcgcttttatttctcctgcaactttttaccacttcttattttttcgaggaaatcacgaatcagcggcaatatggcttctgctgattcttcttcgctacacatcgtttctactggacaccagcctgtgtgatcacgattccatataaaaggtacttcttgtacgaaatggacttttatatccgagcttcgtaataaatccaacgctttcgaactgatgatgtctgtatgcagttcccggatacctcccaaaatcatgagggcggcagcccccttccctactactttgtcggctatcgaagctcctttcagaaaatccggttcctgtgtcagcaaatcatataaatctgctacgccacgttgggtaaaggtacgtatgttgtctccattggcaatcacacaggaatatcctcccgagtgtaataagttgattaattcttccattataaggtcccttgtttcagttgttctacaaattggtctatccggtgcagttctttgggtatatctatgttttgaggacagtgaggtacgcattgattacatccgatgcaatgactggcctgacggagtttaggtacactgcggtcatatcctacaagaaatgcccggcgggctttgacataattctcatcctgtccgtttttaggaacattgccttcattgacacaacggttataatgtaataagacagccggaatatccagaccatacggacatggcatacaatatttgcagtcattgcaagggatggtaggatacttcagcattaactgtgccgtgtcttccagaaaatccatctcttcgtcagtcagcggttccaatggacaataagtgcgcaggttatcctgcaaatgttccatatacgtcataccgcttaatacagtcaatatatcggggaatgttccggcaaagcggaaagcccatgaagctacgctgctttccggacggcgttgtttgagacgtgccaccagattgtcattcagtttagacaaacgacctcccaaaagcggttccatgataatggatggaatcccccttttatgtagctcaccatacagatattcggcatcggtattccgggtatttgtctctttcgcgtgcttccagtccacatagttaagctgtatttgtacgaaatcccactttatctcatcgtgtcgggaaagcagataatcatatacttcgatgtcgccatgataggagaatccgagattgcgaatgcgacctgcttcacgttcttttatcaaaaagtcaagcattccattatccagatatcgtcctttaagggcgtccattccccccataccgatgccatgaagcagcatataatcgatatagtccacctgaaggtctgcaaaagatttatgatacattttgagggaagcttcgcgtgaccatgtatccggagagaaattggatagtttggtagcaatgaagtatttatcacgtggataacggcttagcgcaattcctgtggatttctcagaaaaaccttgtacgtaggccggagatgtatcgaaatagtttactccatgagcgatggcgtaatcgattaatccgttcactgcatcctgatcgatcacttcacccttaccgtcgggagacggtttgagaggccagcgcatacagccgtatcctaaaagcgacacccggtcgcctgttgttggagacgtgcggtaagtcattttgtcggtaggaatttccccttctgccgatgcactgcttgatgaagaagtgccttttgacgagcatccgtatagtatcgctgtcgatgtagccgcactgatacctacgattttgataaaatctcttctgtttatgtctttcttatttttttcttccataatcttgttctgatttaaatcatacaattctgtgcatctgatgtccagtcacgtaaatggcactgaaaggacgggatggacaaagattctcgcaagcaccgcaaccaatacaccgttcgacattgattgccggaatcttcggtgagtccgctatttcgggatcggaagctaccatctgaatagcggctgccggacaatggcgggcacagttgccgcattccattccatcagtcagcggtacgcagttctccttgatccatacagcatgcccgatttggatagcggatttctctgccaggctggtcagatgaatggcatctgtagggcatacttccgcacatttggcacactccggacggcaataaccacgctcgtaggacatttccggctgcatgagagttgccagattaccggatggacgtaatacctgagtaggacaaacagagacacatagctgacaggcagtacaatgttgggcaaagttgcgtgcatttaatgatccgggaggataaatcggattctcccggttgggaatcttcttgtcttcaatggctgccaatcctccgtctacctttttctcctgtgctttcagtatggtagaagtagcgaaaatagtcgatgccgaaagaaaactacgacgggcattgtcaatctgttccgaggtcacggattttattttaaccgtttccgtattacccccttctttcttttgaatacgtctggtatatttaatagctccttgcttacattttcccaggcaatccatacaagcgacacaacggctataatcaatttcatgggctttggcattaatacaggatgctttacaattacgtgcgcacaatccgcagctattacatttggaagtatcgatcacaggcttgaagatggagtatcgtgatatgaatcccaatacggtgccaacaggacaaatggtattgcaataagtacgtccgttacgccatgccaaaacaaaaagcacaataagggtaatcacagcaatgatcagtgttgaaagacttttcatccagacatccacttcatagaaagcatagctttctgcccgttcggcaaaatatgccaagagattatttccccattgccataccggagccagcagactggaaaccatccggccgtatgcactgtaaggtgccagtagaacgacaaaagcattcagtccggcaaccaaggcaaggatgaatacagccaatacaccatatctcagccattttaaagccggagaataacggaagcggttctttttctgtttgccggagaaccatgaaacagcatcctgaaatactcctaacgggcaaatgaccgaacaataaatacgcccgaatagtaatgtgagcacaataaggaatagcacgacacctatgttcaaggctaatactgccggcagaaactgaattttcgccagccatccgaaccatgtgtgcaatgtccctgtgaaatcaaggaacagcagagtaataagtgtgaaacacacgattgcggctgtaagtctgatagtacgcaacataaatttattagattttcaatttatagtagttatatcttaattattttcaatttcatcagaatcgaatcttatgctttttaaccgatgcaaatttaagcagagtgattgatttttgcagtatataaattacagaaagttataccaatattactgattaggattttttttaattctggattgttatatcataattaccgaaagtcattgtacataagagtttctgtcattcagaacatttcccttggtaacgggaggtctgaatgacagagcataatgattactttaagacatttaggattttagtttgtctagaaataaatcttataacttatattgggaattaaccctgttccttctttttcttcaatttcaaaggtcttttcattgtattggtaaaagtgcattccggtgcgcatacctacattcagaatcttcaatgagaactcatgagatactcttttcttatttatccggaagctgacagaaacatcaccgtttatggaaggattgaatcttttgctgtatgctttcgtttcatcaaaaacgatgtcatgctctgtctgacttctttcttcgtttacgggggtgtagcgttcccctccctgaaagaataaacgtccgttgagactcagtacgttttgtttaagtttgccgaccatccattcttttccggcaagtaagttcagcagatagttcttatccagtcttgtattacgccaaacgttatctcctcccctatatttcgatttaaacaaagaacctgtaatcatatagtagaagccatttttcatatattgttccagcgtgatgtctattccataatttctgccttgaccggtgttggtcaagattctgtccaaataaaattcctcatggttaatgaccgagaaggaggagttcttttcaaccggtatacgaaataaatattggaaataaggctctatctttaaatgcaggttttgattgatattccagtcgtatgtcatcccgacatgatgtgcccgggaaaaatccagatatcgatttgactggttcttgccgttgacgaccttttctacaaaataataatccagcttttccctgcgactatgtaatccataggccaacgccaaagaatgtttcggatttattttccattttagggcaacccgcggttcgatggataagttattgttcaaagtaaaatattgggctgttactcctaagctagtgtcccagttattattcagattgataaccgaactgctataggccgaaaagactgtgctttcaccatcaccttttgaaatctgttccataggtctgtctaatccgaaataacggctgacctgataatcaagatcatagtgaaggtttgtaatcgtaacccctgttctgttagtatgtctcggactgaacttcgtattcagataagaattaaaaacgaagtcccacctgctgttccggatatctcctactctgataagtttgtcatctgctagttgatctaccactgtatgatctttggaataagtagcagacagggaagagcggatatacgtgttttcattcatcacatacttgtgtgcaagtcctcccaccattttttctagtctgttttctcctgcttgtcggtctcccagagtttcccatttggaacgctcttctattggagctttgtttctgtcaatcaatcctaatccccaaatagaaaaggtgccggctttggaggtcggaaagtttagcttgaatgctaaatcctgatatttaagattcaggtcattgccggtagccagtgatgtagtcgaaaaacgatagttaacgagataagaacttcctcgctttttactgattggtccctctgatgacagatcgatacccattagtccgacttgaaaagcgtgttcgtacttttgattatttccattgcgcaggtgcatatcgaaaacacccgataatacattgttatattctgcgggaaaagctccgttgtaaaaatccgaatttccgatcacctgtgtactcagagctgacaggaaacctccgcccaatcccgacaaatcggcaaaatgagtcggattgggtatctcaattccttccagcctccattgcgtgaattgcggggagtttccgcgaatggctacggcattggtgccgatgtctcccgctactcctgcgaaagcggcacttaatcgtgcagggtcatcgaagccgttggcaaatctgccggcttcttccatgctgatcatacggccgcctgtgatagccataggattgatcgtccggtttttctttatttccggcttcacgaggacttctgccagatattggatattctcgtccatcggaatttctacatatacttctttggatgaagttacggatacctcactgattatgcttatgtgatatcccgtaaaagacgcttgaatattgtagcgtccaataggaacattgctgattctgaagtttcccagactatctgtggagctattcaaggaaggttcctctaagacatagacagaggcatactctattggagcattagttttggaatcgactacaattcctcttatggtttgcgttagtttttgtgtcttttcgccgattgtttctgtttttggtgtcggcagagagataataatatgatatccctttattttgtatatgtatccggtacctttcaatatttgtgttagtgccttctcaatgcttgcggactttagcgacaatgcttgcctctttttcaggttcaggtttgactgttcgtaagctatgctatagtctgtttgtagttctatttgctcaaaggcttcttttaaagagatatttttattttgaattgtaattttcttttctgcattttgggaaattgccgtcaatgacagaatagaaaaaaacaaaagaatgatcatcttatctggttttttattcgcattaattcgattcattattttatatttgtacgttgatacttcgtttttacttcgcggtttaaatgaggatagacatttcagaactgggaagagggtctcaagctgcttcccggttctttttgttcataggctattttttttatttggttattattattttgtttccactctgccgatagctaaagccgattatatctcctaatatattcagcatttcatccagattctcatctttcaggaatttgacagtgtaccgtctagaggcagaaaaatcggtagaatgatcgataacagtatcataacgtcgttccagcgttctgaatatttcttcggcagtagcattggtgaagattattttcccttttacccaactgttcgtgtcaacagtgtctactgtcgatatctcaatatctgatgtcgatttatcataggtgagttgttcgttgggcttgagagtttgaggaggacgggattgcgtactcacttccacttttccactagtcaacgttgtggtaatattcgcatcattagcatatgcctttacattgaacttcgttccaagtaccttgacggatagttgcgatgtttctactatgaaaggttttgcatcatcttttctgactgagaaataggcttcaccatcaagggttacgacacgattctctttggtaaaagttttcggataggtaattgtacttccagcgttcagccatacttcggaactatccggcagaaccaagcgcttttgttcgccataggctgtggatatttctatctgctcgttttcggaagggatataataaagcaatcctcctgccaataagcatatgggaataacgacggctacaatgcggacaaacttatgatataaaacaatattttcaagatgttctttgttgtatccggttcttaaattgacccgctctaaagcactgtatgtttttgaatcggcttccgtatccagttcgttccaatactctaatgaggctttttctttctcctccgcgttttcttccttcataatccatcgctgtaccttttcctccgtttcaacagaaaaacgtccggaaaggaactttttgatgattctggtgataatattactcttttccatttttgctgtatttactatatatacagtctgatgacaaaaagctcaatgaaaaagtggatgtttttataaaaaagataataaaaagcacgagatagctttccgtatctcctttaatgcgaggcttaactgactttcgacatttcttttagtggtgttgagctgtattgctatctcagcattgctcaacccttcctgacggcttaatgtatagatcattttccgctgttccgacatttttccgacaatgtcatctattaataagcctaactctttagcaataagatcttcttcggaggtagaactatattcgatctcctgactactatttagataagtgtcatgtacatacttatgtttcaagaaatttatggccgaattacgggcaattgtatgcagataagaactaaaagacttggatgcatcaattgaatcatgattgatccaaaggttgacaaaaaggtcttctgtcaattcttcggcatccgattccgattttatatatccgtcgatgaaagcctttgttttattgtaataggctataaaaactgtttcaaaagccttgtgatttccatcctggaaggcttcaagcgtttttatgtcaatgttattactcatgttgtccgactttcatttttattagtgaggacaaaagaagtaattatttggcttaaaaacgcattcttttgaaaatatttaagatgtatccctgctaattattcttttttgtaatataaataatgccaaccacattcagcaaataaccgagtaaacaaataatgggtgcaaaacatatacgaagtctgctgaagatatcaggattatatgcggcaggggtactcccctcgccgctcattaatacatatcctgtgataatcaatatcgaaccaatcgatagaataatataatttattttactcaatgcatttctcatacttctgatagttttattgttttcaagtttatatttccggattttagtttctaagtcccacgatttgagagaataaagcatatttctcctcaaagcgctgattacttagcctgtattcctcttcatcaatctcttttacaagttcattatactgattccattgccagaacttatacaggcaatctctctgaaccatattgatcctgttgtctcctaatgagaatgcccagttgatgtaatcttccgattcggctgtcaggttctttaacagaggcattgctttcgtcttttctcctagggcagcataggctttggctatgtcgaatgacccgctttcatagatctcggggacattgtacgccggaacagcttgttctgcataggcaagtactttccttgctcgggtattgtcgccctgcctgatcagttcctttgccagttgggcgaaaagccttcgatgataatagcaggttcgcagggtggtttcatccagatagagtccgggagtgtccagtccgccatacttatatctgttcattacattttcatacaatctctctacatctatcgcatagttattatctcctttgacatttccccattttttataatcaaaaggcgtgaaacggaaagctaatccttcctgaacgaaataatgatcaaacttcagcttgctgacctcaccgacggatattgccatgtacaatgggcgttcccaattgcagttggcaagcatttccagcatcagcatatctaccttggttagaatacgcatatctttcagagaaatatagatcttatccggtatcgcattttttagttctttacctttcagatgacggatggagtcgggaagcattatgcctgatcgaagcactgcatctttatcaatgctgatactgatcgtatcggtagggattacgtggaagtcctgtttctccgataatgcccagtacttcaagatgttttttacctcaaacggatcattgccgaaactatcacgggcttcttccggatgtttctgataaagctcttctatctgttttttcagttccggtcggatggctacgtattcgttttttccttcctgatattgatctttactccaggtaatgggtaatccgggtgcatcatacaacgggcattgctgctgataaatataccaatctgtttgcgcataactcaaattgcagatgcgggcatctctgcgtactccttccgtgtcctgattataccacaagggaaaagtatcattatctccgttactgaaaatgataggatttcctttgtcggggagtgtcatcagataattggctccaaaatcacggcaggtgaaacgattgctccggtcatgatcatcccacgtctgactagccatctgaaccggaatcagcaggcagagaaacattaacaggccgacttgaagtactgacgacttcttttttcgaagtgcgtcacacaatccggcagctcccattcctatccaaatagcaaaagcatagaatgaacctgcgtatgcataatcccgttcacggggctgaccgggagtctggttcaaatatagcacaatagccagacctgtcatgaagaaaaggaaaaacacgacgctaaactgttgcatccccttctttccccgcatccattgccagtaaatcccgattaatcccaataatagcggcaaagcgtaaaatacgttatgccctttattctgacgcagagattcgggtaaaagttcctgatcaccaagccttagattatctaacagaggaatacccgtgatccagtttccatgctccggttcgccatgtccctggatatcattttgacgcccgacaaaattccagagaaaatagcgccaatacatataattgagctgataagcgaagaagtaggtaagattctctttttgcgtgggagctccgtccgttccttccgaccagcttttgtaggaggaagccatgcgatcattccacattcgtgaaaacagcatattttgagtatagcatacttcctctttatttcgaatcactttatatttcccttcttccctattcggtctgtagacagcaccacccgttttcatttttaccttgtaataatctccttcgggcacatactccggttcggaggcatacgttttgccataaagtaaaggggcgctttcgtattgctcccggttcaaatagcttttgagtgcgaaaatattatccggagcattttcattgagcggtgtattggcattggcacgaatcaatatcactgcataggtggtataacctacggtaagcataagtatgcaccataaagctgtattgattaatcgttttttgaaacgatagataccagctatgagcaggaaaaatgtgatagccagaaagccaatcagtcctgtttggaaaggaaatcccaaggcattgacaaagagtagttcgaaccatcctccaatatccgccattccgggaatgtagacaaaaagtatcaatacaataagcagaccggataaagcaatcgccgcaattgctcctttaagcgaaatcgttcgatatttctgataatagaaaaccagtacaatcgctggaatgcaaagcagattgagcagatgtactccgatggagagtccgattatataggcaatcagaataatccatcggtcaccataaacggtgtccgactcatcctgccagcgcagaatcatccaaaaaaccaaggcagtaagaaaagaagagaaagcatatacttctccctctactgcgctgaaccagaaagtatcactaaaagtatatgccaaagctcctaccaacccggaaccgagaatgataatcacgtcggttactgacagattctctttttcttctttcagaagagatctgaccaggcgagtgatactccaaaaaagaaagaggatacatcctgcacttagcagtgcattcagaaagttgactgtacgtgagacctgggagggatcggaggcaaactgtgtaaacagattacctaccagcatataaaaaggtgcaccaggcggatgtccgacctgtaacttttcggcgcatgaaataaactcaggacaatcccaaaaactggcagtaggttcgattgtcattccgtatacgaaagctgctatcaggaagacaagccaaccactgaaatcattccatcttttaaataataagtagttcatagttctgtaacttttttgtttgcaaagttatagaacagtgatataaaacaggcatttttagccggacggatacggacatcccatttctataaggtgttgaaaaacagaactttttgtcaggtaattccggacaaatgcggactacaatgatttgatgtagtcttccagtgattctttggaacttacaagcataagtttctccgtttttattctggatattcttcgggtaagagtttctacagtcagtttcattagatctgcaaagcaagcaggctggataccttcgcgcaggaaagcacatactctcaaatcttcttctgtaagtttaggacttatctctttcaatttggaaacaagtccatatactccttcctgtagtcttaataattcactccagtctttctctgaaaaagaaacaaccttggaaggggaaacagaccgttcttttatttgccggactttcgatactaccggagaactttcataaatatgctgttgaagcgactgatatttttcttccagatagttacattgcaacatcagtttatccgactctgcctcttttcgcaacatttcatctttaaaagtagtcagttgagaatatacaaacttattcttcttccagagcagcccgagtaacaaggacatcacaccaaagactcccaatgcagaagaaagaataatcttcgtatcgcctgtctgatcgttcagcattagctggctggcataggcttttctttccatttccaatgcttcgtcgaaatgaccatatttctgataataaaggctgcaacgtctgcacaccttggctacataatcgtacttctctgtaagagcagcaagctttattgcttccttgaagtgggtctccgcttcctttttctggtcaagatcactctctacgcatgccagataaaaataagcctttgatttctgaagttcattgccgtgttggtcaaagtatgaaactgcctgacggatttgcttatcagacgtatgggcgatatttttatcttcattcagctgggtacacaacagattatattctgccagctgtgcttcgttcatctggttgatctggatattttcgagaataaccttaattccgcaacactattataaattaaactttttaagtacctgagcaacaaaaagttgctcaggattttgccatgtcagaattttcacttatcttagtgttgcaaaaaaaacaagagaatccgacgatagacatggcgaagatacaaattaaatctgagagactcactccttttgggggattattttcaatcatggagcaatttgactccacattatcatctgtaatcgactcaaccctcggtctaaggtgtagatcgttcggttatcagtacagcgaaatcatccgttctctcatgagtatctacttctgtagcggttcatgtattgaggatgtcactactcatttgatgaaccacctctcgcttcatccgacacttcgcacttgtagctctgatactatcctcagggcgataaaggagttgacgcaagaaaacatttcatacacatcagatatgggcaagacctacgatttcaatacggctgacactctcaatactttattgctcaattgtatatttgcatctggccaactgaaagagggtgagatgtatgatgttgatttcgaccatcagttcatagagacagagaagtatgatgcaaagcctacatacaagaagttccttggttatcgccctggcgtggcggttattggcgatttgatagtcggtatagagaatagcgatggtaacacaaatgttcgtttccatcagaaggacacgctgaagaggttctttgcgagatttgaacagaatgggctcactatcaatcgcttcagagctgattgtggatcatgttccgaggaaatcgtggaggaaatagaaaaacactgcaagtccttctatatccgtgctaaccgctgcagttcgatctacaatgacacctttgctctcaaaggctggaaaactgaggaaatcaatggcattgagtttgaattgaactctatccttgttgagaagtggaaaggtaaggcatatcgacttgtgattcaaagacagaaacggatggatggtgtgcaggatttttgggaaggagaatacacataccgttgtatcctgactaacgactatgattcttccgtaagagaaattgtcgagttctataaccttcgtggaggaaaggaacgtatcttcgatgatatgaacaatggtttcgggtgggacagattgcccaaatccttcatggcagagaacacagtgttccttcttcttacagcacttatccgtaacttttacaaggccattattcaaagacttgacgtaaagaagttcgggctcaatgcaacaagtcgcataaaagcgtttgtcttcaggtttatctctgtaccagccaagtggatcaggacatcaaggcggtatgtgctgaacatctatacctgtaataatgcttacgcagatgttttccagactgattttggataatgcctacaacttatgggaatgatattgtgtattgcctcaagtcacattgtggggtaaggggatattgtaggcagaagtgggtgcttcaagttcaaattatctgcaaattcagtaatgagaggacgtgtaaacgcaataaggacgttcaagggcttagttgcggatttgaggaataatagatgctgtatccggatcctgccccattagctgtgcggctttgtctaatccctgttttacattagtcccttctggatggcatgcagccagtgaaaggacaaccacgtataataagattcgaagattattcataactctgcttttatctttgtatacaaacgattggatttgcaaatataaaaaataatatgatacatacacctctataaaccatacaaaaaatggtgtcactatcctcctctcatagtgacactatactgtgatcatagttacaccatcacggtaggatagtgtcactatattatttatcctcctattattatgcatatcgcagattgccctcatgttttttttgacaaagatcaagcgatgacgggctgtttattaagaagattagccgtatctttgtaacaaataaaaattgtatatatcatgattaagaacattgtatttgattttggcggagtgattgtagacattgatcgcgataaagctgttcaggcgtttatcaaactgggattggcggatgccgatactcgtttggacaaataccaccagaccggaatcttccaggaactggaagaaggaaagttgagtgccgatgaatttcggaagcaattaggagatctgtgcggtcgcgaactgacgatggaagaaaccaaacaggcgtggttaggctttttcaatgaagtggacttgcgaaagctcgattatatattgggacttcgtaaatcatatcatgtgtatctcttgagtaataccaatccttttgttatgtcatgggcatgcagtccggagttttcatccgaagggaaaccgctgaacgattattgcgacaaactatatttatcttaccagttgggacataccaaaccggctcccgaaatattcgactttatgataaaagacagtcatgtcataccttccgaaacgctcttcgttgacgatggaagttcgaatatccacataggcaaagaacttggcttcgaaaccttccaaccggaaaacggtgctgattggcgggaagagttgaccgttatactaaatagttgagaagaggtatctttatgctcctcctacctacaggaggggaccccggaaggaaaggtgccaggtaagcaatttctaaaaccttttcagctctttcttttcaaatgtccactccggtgtatacaatctgccactgtctgtatctgtcagttcataccaaggtgacagatttcggttggcaggattgacgaggatatgtatttgctgggcgggcatataactttgcgccaataaaaaaactttcttttttgttttcgggtgaattgccacatctactactatcacggcatggcccggtgaacctcctttgataaacacatctcctgcttgcagtgaagtataaggaaccgtacgaagctcttttgaaagagaagcagtgccggcatacataaataccatattcaagtatttacgaaaagtcttatatgaatagtctttgcctcctgcagcataccattctaccttatttccagttactttgatacggtttccttccgcccattttttatattctgccggaaagccattggtaaagttaaatttgatttctccgtatcttttctgtgcccataggtattctgcccgcaagcgcatgactgcatccgcacattgctgtaaatcgcgattgcctatttccatatctactacggcgaatgcggctgcctgattccttttctcctgtccgttgtaaagtaaaaccttactccctttgggcaataatgggagttgacgcagataggcggcaaatgaatgttcatcgcatacttcacgagtgtagcccgtaggaggaagaatggtgctttccactgactgtcccagcgacactataattgaagtcagacatactatgctgaatataagtattcttttcatatcgttatttttcccgaagataggatatcttttgcagaaaaccaagttttgcaggaggaagcttctgaaaccgtctaatcagaatactattcggcaaaaacagaagtttcggatattctctttatctttgctgcaaataaaagaatatgcaaccacaaatcatactcattaccggagcttcttccggattcggaaagatcactgcgcacatgttatcagaacaaggtcatatcgtttacggtacgagccggaaaccttcggagaatataggtaaggttcgaatgcttgtcgttgatgtaacgaatagtatttctgttcgtcaggctgtagaacaaataatatccgagcagggacggatggatgtattgattaataatgccggtatgggaattggcggagcattggagctggctaccgaagaagaagtgagcatgcagatgaatacaaatttctttggcgtggtcaatatgtgcaaagcagtgctcccttatatgcgcaaggcacgtcggggaaagattatcaatatcagctctattggtggagtgatgggcatcccctatcagggattttattctgcatccaagtttgcagtagaaggatatagcgaggccttggcgctggaagttcatccgtttcatatcaaagtctgcctggtgcagccaggggattttaataccggatttaccgacaaccggaacatctctgaactgaccggacaaaatgaagattatgcagacagttttctgagatcattaaagattattgaaaaagaagagcgtaacggataccatccccgcaagctgggtgctgcaatctgtaaaatagtagcgcgtaaaaatcctcctttccggactaaagtaggtccgttggtgcaagttctgtttgctaaaagcaagagctggctgccggatagtgtgatgcaatatgctctccgaatattttatgctatcagataaaaaaaagtttcatgccttgaaactgttggtttcaacggttgaaactttttgtttcaagcaatgaaactaatcgtttcaaggcgtgaaactaatagcgtgtaatagtacggcaatcagttcttcggaactaattccaaaaacatagtagtcgtcaataatatagccagcccgatgcagactgttattaataaccagttgatatatttagctttgggcttggtatctgcgtgcagattattcaggaagtattctctgaagaagagatagagtcccggaatagtcgcacttgccaaaaggaagtcttccggtatctggaagaagtaagtcttggataatccgatcaatgaccagtggcaaaggaacaataccaaaaacatatttaccttgtgtgcaaacagcaacagcagtccgatggtaaataccactacagagcaaggcatcaccggagaagtcatttccgggaaagatagcccgcgtgccaacgataccataggatatatgaaaggcatggccagcaatacataagatagcagatcatatttgtgtgtacgttcgaaagtcgtatatccggtgattgtatcccatatccagataatagccatcactccccagaacatcgccattactccgttatagctgcgttcttcgcagtagataaagtaatagacaatggaaatccacgaataaagacctatcatataaatcttcattcccatcttcacccacggacgtggtttgctgatcagcaatgcggtcagcacaatgccgatcagaatgacaataatctgcaaaagccaagtggctgaattataatacgcaattgttctccaaaaaatctccataaaagtagtttaattaatgtcttgttaaagaaaaggctctgtgcgggaacaggaacatcgggaatgtagctccgaccgcaagcatgaaaattactgtacttgccaccaaagtgttggagaagaacatctcctgcatctttatatacttatcatgcagttccggtttattcgctgtctgcaagcacataataagagagaataccatgttgtacgcaaattttcccggaatcatcgggagcaatgcgggaatatacagcaccgtcatcgggcaatatacccgctttccgagccataagctgccgaacccgattactaatccaccgaataaagaagccgtagcaatatctacacccaagtaagtcatcagacagaaacggcacgcatgtcccaatgccgccaatattgcaatcattttaaatgcacgcaacggaggatcggaaattgcgccaaatccgatacctgctatcgctgcaaagaaaccatcagaaagaatatcaagtgctaccatatcaaattaaactgttttttaccattaataatgtaaaggaaaggccgatggcaatgctgacaatcagcaaagaggcttctgtcaaacgggcaaatcctgtcaaaacgtatccttcgacaacatcaatcactccattaatcaaaggaacaccgggtacaagatataggacgctggttgccagtgcgatctcggaagttgtgtcgaaaatcaaggcggtagaagcacagagggacgcgacgaaggccgaaacaatgaatataatataatgattcattttcttcttttgcatctgctgtttcaggtataatcctgtaatagtggcggagaaaacgattcccattgagattaagtcgccgccaaacagtttgcagaatgacgcattggcaaagcctaccaatatcaaaacgaacagaggatgtatcatcggagcagagactatctttttgtatttctctttcagttcttccaacgataactgtttgtctactgcttcccaactcaaagcgcttagttcggagttatgctcaaaactgatgggatgtgcaggaatatctataacctcgttgcaggcttcgtttgtctccttatcgatgatagtaagaatgatatttttatgaaatacgcccagtttgacatctaagccaaaagcttctccgatacgtttggaattgcgtacaacacgggaggtatgtacccccgctcccattagatgggctgaatattcggctatgaatttacctatagataataaagattcgcttgtcttcatgtatgtgatatttttaaatcggctgcaaaagtacaaaaaagagtaatagcaggaaaggtaaaacacaaaaaataaatacctttgcctgcataaaaagaatgactcatgaacaaccaatttacatatccgaaagagaaaatacgttttgccatcctgactttcttctttgcccaaggactctgtatggcaagctgggcaagccgtatcccggatttcaaagatgtatttgcagccaattatgcattttattgggggctgattttatttatgataccggtcggcaagtttgtagcaattcctttggcgggttatcttgtatctaaattagggagtcgcacaatggtacaagtcagcattttgggatatgccatgtccttactttgtgtcggattggctcatgaagtctatttgctgggattcctgcttttttgtttcggagtgttctggaacttgtgcgatatatcgttcaatacgcaagggatcgaagtggagcgcttgtatggtaagacaatcatggcaacttttcatggaggatggagcttgggagcctgtaccggagcacttatcggcttcgtgatgattctgacgggcacctctcctgtctggcattatatgctgatagccgctattatccttatcatagtactggcaggacgaaaatatctgcaagaaacaacgcttcctatatgcgaacatccgaagccgggctttgagacaacagacaaagcggctgataaagctccgaatggattccgtctgttatttcaaaagccggaaatactccttttacaattaggtttagtcggattattcgcgctcatcgtagagagtgctatgttcgactggagtgctgtttattttgaatcggttgtccatgtgcctaaatcattgcaaatcggcttccttgtatttatggtcatgatggctacgggacgattcctgacgaattatgcataccagctttggggaaagaaaaaagtactgcaactggcaggcagccttatttgtatcggcttcttcatttccgcattgttgggcaatgcgtttgactcactgggaatgaaagtgatcatcaattccttaggctttatgctggtcggactaggtatctcatgtatcgtacctactttatatagctttgtaggggccaagtcaaagacgcccgtcagcattgcgctcactatcctgtcgagtatcagttttattggttcgctggtcgctcctttgcttataggcgctattacacaggcattagatattcgtattgcttacatgattataggtatattgggaggttgtatcgtacttatcgtcagtttctgcaacgcattcgatattcgggaagaaaataaactgtaaatatataaaacacagtctctcacagtacttgatcactcaagcatctgtgaaagactgcgtcaatctttttactaaccttaactaacctaacttctatctaatctaactacaaaatgttcgaaaaatcttttatactactaacaattctatcctttaaatcttggttttcaaccagtgaaaagtcacaggcaacatctgccggagccaataatacggccttagcttcttctgcatctgctatctgttccgggtgttccctgaaataagtttcccattgggaagctgcttccggagttacacccagtgcataattgatgaaatcatcatccgtcaaaaaatcctttaccttagagcacatatcgcatcctttttaagcgtttacatagataggacgctgttactctgtgtatgtactcaaccaaatatcctttttactataattaacttgccagactacgcaattttgtcaatccacgatgcatcaggttgcgtacagactgatagttcatattcataatctcacaaatatcctcgtatttcttttcttctatataatataatgtaagtgcttcacgctgccggggagaaagctggtccagtaaacgcttcaccagcgagaactcatttttgcgttgctcttcttccatatagtcatcttctacgtctgtgggagctactgcatttacatcttctatggctgtatcagacatatacatacgtttgcggagttcatcgcagagtttgttctttaatgagatgaacaaataagacttcaaattatcaatagttcctaattcatcctttttagtgtagagcttaacgaaaatatcgtggatgcaatcttttagtaactctttatcaatggtcaacttcaatccgtaattaaaaagaatgttgatgtgcaaatcatatagctgcgaaaaagctgccatatttcccgcttgaaaagaagcgagtaaagtgtcggttgaattattagtctgttccatcatagcattaattcgattgatttgatgttgcaaagctaagcagaactgacctcaaccaccggtaaaatctggtttgtaggttgaaaaaataagtatcatgttttataacactcttttgttagaaattacctataaaatggaaaaatcccgctgatcagtcatcagcgggattttttgtttcagagtttatggaaccaataaataccttctttcttatccggtacctttaatttgtatactccattaattttcaatgatttatctataatattcatcttccctgaaccgggatgtatgtactttaatatatactttccggacgataattgaacaggaatttctgttccggacttggaataaatgatactgccgatatcagattttaccattttcttatagttgtcggtatcggtttcttccacttccatagccgctgcatccttcaggaatgctttatctgtgcacgggattacaggacatgaaccgccggccatgaatacagcccatcccatagccggataattctgtgcatagaaggttacggctttctccgggaacttctgacgatattcgtggacagccttgtaggcttcggtgaaagtgacctttccgactttcatcttacgcatatgttggcggggagccatgttcttccctccttccggtgcaaagactccatccgttttatagtgccagtagcggatatcaataatatccaccacagccgcacgcttcggatcggcaaggatggcgtcctgtacatcttttgtggtacttaatgctactttggctttctttccggtttctgtttcccattcggcaatcacatccagccaaaactgtacaaaatgtagtggacctgtaaattctgcacttgtcaactgaatgacattcgggttatcagcaaagttgttcagacactggcggatgtattgtctgtgtaactcacggcgaaccggatgagtgatgtcataaaacatatctgcaacaaagattcgtttgtctcctgcaaacggagcaggttccggaaatccggtctggttgatattgttggtgcttctccacggacaatctacccagtgcgcacctgcttccaggatattgtgctggaaatagttctcatggaatagcaatagtccgtctttatttcctttttcggcaaactctttcaatcgcgaccaataccatgcattagggcgattcagatcatatttgctcagtccttcccaggcagtaccctgaccgctacgtccgaaaggttgttcgtagaaaggcccccatacatctccgtcacgacggcgcactcgttcatgatcatcccggcggcgatcataccaaagtccgtagttttggtcaaataccaatatgttcttttgtttcatatagccgattacggaatcgatgcgatctgtcagtcctaatccttcacgtccgggaacaaagcgggtgatggcagggcttgcttttttcagaaagttggttttaagttttccattccaccaaggggtggtatggctacttcctaccaacaaagtactgttcatctggatacgtccgtttgcaatagttacttccggttgtgccgatgtcttgttcggagttatcttcttttctttaatatcatcgattgattttactccggacatagctattgaaggagcaaaggctccttgttcaatccagtgttccaatgtcaggcggggattgtaagcctctttggccagttccatagcaacttcaacggtcggactgctggtggcacttgtatttcttggcaggatacgggcacgttctgcacatttcttctgcaaacgatcttctaattgagcatagaaaatgcttcggggctgcacatgattgtttgattgtgcccattcgccgtcaccggagaactgtgcccagcatccgtacgcacggttcatggcatcctttgccggagcataacactctatttcggcagcggtacattgccagaacagactatttgccgtattccatcccgctccgttcttgtcctgtcccagattcttgaaactcagattatgcccgtctatattaaccacgtcaaacaataggccacatgcccatgcatcaatagatccgctgaaacctaaagattcatacgaatcacattgtacgaaagcattcggtccggcagcacaatatccggctgcaaagtcatgaataccctgttccgaatagcagcgctggaaaagtgtctgttgtcctaaggtatagaaagtacagcggcgcattcctccgatttcagaaacaggttcccgtgagatacagtcctcaaccgtgatttgggaaccggtacgctgaacaaggattgcacttcctgcaaagtgtttaaagctcaccctgcgtacccagcaatcttccgcatcttcgatagaaatacctgtccagcaatgatcttcatctttagggtaccgtttgtcatagtcggaaatcagagtcatattttctactccgcactcccggatgcgcccgttccactgataagtaatcacggaagaagtaccgtatttggcatccagcgccactgtcagcggagcgtccaacgttatctgattaccgtttacttctgtcacggttctatcccaggtaagatccatatctccttctttccagcccagtgcactgattcctcctccaaagatatcacatcctaacgaagcaatccattctttgctggacggacggttcaccagtatccgatctccctttctcaacgaagtacctgaagcaacttccaatgtcctcgcatttaccggaacatatttcgagagtacctgcaatgtatcctgtatcttcagatcgtctgtcccttccatgtagataagggcacctctgtctactcctttttttagaagtatcgttttctctttatccactccgcgcagtacgatgccggaggcatttatacgaaggcttccggataaagaaaattctccctgatccaataacacggctcctctgaaaccggaagcatcaggtactaatgaggcgacatagtcaatggcgcgttgaatacgtgatgtattatctcctgctgtccaaggtacaaacacggcattgcggacagaaggaatatcctgttcggagcccttgtagccacagtacgagaaatcaagaatccggtttccctgttcgtcattcaagtaagtgatccggtcatccttaacctgtaaagcaaaggtttgcgcatatccctgcgcaaaccctatgctcaataatcctaaaaggatagttcttaattgtatattcattacaataaacgttgttttctaattattcaatcctgaaagatcatttgaccataagcaaatcatacgattaaaacagacttttccgtttggacaaggtatcgtagttgttcttcagatctgtccagtctactttcttctttgtatccaacccattgatatatttctcaatattggtatagccgtctccattacagtcctcctttgcatcagtcggatcgttcggattcagtccgttggcaatttcccatgcgtccggcataccgtcaccatccgaatcaagatatgcttctcctttgtattcaggaagtccgcccacttgacggatatcggtgatgataccttgtttgtaggagtctgccggcaagcgtcttttcacgtaaggagagataaattccggagcatctttcgcataaatcgcttttcctgtttgtacagtcttgatgacgcgagcgtctaccgcatcccgtttcgggagagtagcacctacattatccaatacaaagttataagctttttgggtatccataatcgttacaggcgacattttgaatgctttgtccactctgatttgcggtaagaactttccctcatccacttcactggcaagctgaactccgccattccagttatcttttgtcactttagcatttccgtgaatgatgttaccgtttacataagcctttccgaaggacatcggtttgcttttatcgcgtccggcttccggtttcaatatacgataggaaataggtttatccagcggggtgataggaccgggtttaaaatagttattgattatattataaaaactcttgttatctcctccgtcgacagaacggttccaccagttgaagacaacattgtttacgaagttaaagtctccgtccatacccaccgaactgttacgactgatattggaagcgaaaagattacggcagaacatactattatgtcctccgatagtggcaccaaacgcatgattataagtatccaatgcttccgagaacatcgaattctgaatggtaatgttcacagtaggcaacttcagtccgtgcccggtttcatccctgttgtagacgtggcgatagatagacatattttcatccagtccccagcttgccgaacagtggtctattataatattgccgactgcatttcctcctactgcatcatcccggaaagcaacatcctgtgccccccgacggaaacgcatatggcgaatcactacatcatgagtatcgatcaggaaagaatgaccggtcacgcagataccgtctcccggtgctgtctgtccggcaatcgttacataaggggcacgtacactgatcgggcttttcaggcgaataatacctgacacattaaatacgataacacgtgcaccaccggtttcacaggcttcgcggaatgtgccgggaccggaatcttccagggaagttaccacaatcactttgcctccacgaccgccgggagtgtacataccaccaccttccgcaccggggaaggccggaatattactttttatcaaatcctccggtttggaggcccaaggtttgtaaggtcttcctaaccttgcttcttccaaaactgttggcaaggctttttcccatgccgcatttgatttctgttcgaactctgcctcttgttttgctcctctttcttttaccgagtcggggatcaccggatattgggctgtcacaggtagtacacaggcaaccaacatccatgctgataatactttcttaatcttgttcattcttccgaatcttaataggtttttaaaaaagacgattaagaaagtattttgtaatcggtctttctatcctttccgccattcattcatatattcacggggagtctgattatatttcttgcggaaacacttgctatagtagcccgaatctttgaatccgacagcaaacgccacttccgaaacactcaaatccgtatttttaatcagttcgatcgatttattcaggcgaatctcctttaccaggtcgacaggtgccagtccggtaaggcttttcagctttttgaagaatgccgaacggctcagtccgatgccggaagcgatcgtatcaatattgaaatcactgtcgtccatgttttcctcgatcacttggtgtatcttttcaaggaactgcacatctttcttcaccagatattgttcgtagctgtcttcttccgttgtcgtctggttctccatttgctggcggatacgttcgcggaacagtttccgttcgccgagcaactgatcgatccgtgccaacagatactctttgctgaatggtttggttatatatgcgttcgcacccagagtgatcgctttggtcttggcaccttcatcgctcttggctgtcagaataatgacagggatatggctgatctgaaaatccttccggatagattgcagcatttccagtccgtccatttccggcatcatctgatcggtcactacgatgtccggatgatacagatgcactttcttcagaccttctacgccgttattggctatatggatgttgaatttatcttccaattgcagttttatcaactggcacaggtctttattatcctctaccagcagaagagtcggtaatgaagcgtcaatttccagttcctcctccggttccttttctgaatcgataaccatcttcttgtctgtagcggcaggagcagtttccgtatcactgacatagaagtctacttccgacggacgataatggtccttgtccagcaatagctctacaataaacacggccccctgcccttccggactttcggcacggatgataccgtgatgcaggtttactatttctttggaaagtgccagcccgatgcctgtaccctgataatgtggattattcgcattctctccttgtgagaaacgctcgaaaatttcactcagcttattttgcggaatgccgacaccgttgtcttctacccgtacatagcaggattttccatcatctgtcaatccggtagttacataaatacttccaccggaaggagtaaatttgaacgcgttcgatatgacgttgcggataacaatactcagtttgtccttatctgcccataccataatcggttcgtccggcagttggaatgtgaaactgatttcattttcctccgaaagtacacggaattctttttggaaggaagctatcatttcattgaaatcaatcaatgatacgtgcagacgcatcttgccattctgaatctttcggaaatcaagaatctgattgaccagttgtaacatttggttcgtattcttttccatcaggtccacgtattgcagtcctttcggagacagttcttcccgctccttcagttcttgtatcggcccttttatcagtgtcagaggagtacgaagctcatgagaaatattggtgaagaacttgattttcatttccgatactttctgctcgatataaatgtcgttcttcattttaatcatgaagaaagccaggcgcagaccgaaatagagggccgcgatgccaaggattacatagataagagtggcccaccaactcagccaccacggcggaagaatggtgacagccaatgtacatgtggatacaagttccgaattagcttcatccatcgtttctacacggaatatgtagtctccgggaggaacattggtataagaagcaatacggtttttgccgttatagtgccattccttctcatacccttcgagtatgtaacgataagatacgcgattctgattgtagaaatttaatgcagcaaattcgattgtgaacatagactgattatacttcaattgaagtgcatcggtgtatgtgatagactcctgaatcggacagtcgttcaaacttcgaagattacgattggatactttaaagtctacgatacgggtgtcatagttggtatgttgtgtctccagtttatcaggagagaatgtcagaatcccctgtcgcgaaccaagccataagtctccgttcaatgcacgcaacgcactgccttcttccagttcaacattcaggaaaccatcgtatttgtcgtagttacggaactgctctgtcgccttattaaagcaggacagaccaatttcggtagtaaaccacaaatttccgtttttatcttccacgatggacttgaccacatcgttattcattccttcacgtatgccatatgacttgaatatcggttcacgtttttctttgtcatagcggaccagcttattcagacctccgccgaatacactcacccaaatttgcgaatcactgtctttatatagaacataaatgtcattgtctgccacattagaacgatcgctgatctgtcggtacgtctcaaactgaatctgttcgggagtcgtaaaatgtccgtcaaaagacatcagaccatccatcgtacctacccagatacgcccgtcttcatcttctgtcattgtacggacttccatatacagaccataagcgggatattgtttcagtccgttgtatttatgcttgaatacaagtgtcccgttttcttcggaaatcaagttcagccctccgcccaacagaccgacccagatacgctcctgactatcctgataagtgaaatacacatcattgttactgatagaattcggattcttgggatcattcttatagcgggtaaaacgcagaccatgtggtgagttcatatccggttcggctttgacaagtccgtttcccttagtggaaaaccacaagtttccttctttatcttccatgatatgatatacggcgcctatcagataattctgatccgtaaaaacctgttttatctgcccgttgctatccagacgataaagcgcgtgccaacgggtaccgacccagatgtctccattcttagcctgatacagtgcacgtatcccctgattccaagaggtcgctctttctgtgtctacagggacaggagaaacttctgtcagcagttgaaattgcttcttgggaaagttaaccttgtatactccgctgcctgtagatgccagccaaagaataccgtctttatccagcaacagatgaaagaagagctgatcgggaaggtcgtcggaaaaaggtttcagttgattgatacgggtcatttccagtttctccctatcgaagagcagaatttctccaccgggggtgaggaaaaacataccctgttcaccggcatcctgcttttcaaagttaccgatggcattttgtttggggaaaggaaagcgatgattgcttttgttcagaggatcatagtacgtcaatgcctcattaccttcctgaaaccaaattttgtcatacttgtcattgaatatcattcctacttttttccctgcgatggagaacggtagtttggtcagttgtttgtagccgatgttatattcatacgcaccatcaacggtggtgatatacattaatcctgattcagtgaccagtatattggaaatcggttgatcaatctccggtatttcgtagcggttgactactccattttgcggatcgacgctataaatatgtccgttcttatctcccagccataagaatttggaactgtaggaagcacaagtgaactggtccggattggcagaaactttcttttgaataaagtcgacaggcttatctttcagagcctctccttttcttaatgaaagaatctgatagtccataccgatccaattgataaactcggcagtttcacaaaacacattatgcttgaggcgtaagtcgtagacgttgacattgggacgcgaatcgtgcaactgcttcatggtgattttaccgttctggtctgtatttgcacgcagcaggcttttatctttggtcagcagcagtacgtctccgtcatctgtcgtctgtatcttgataatctgaatattttcagagtactcttttacatcgtcatacactgcgtggaaactttcatgtttcttatcaaacagatagagtttgcggtcgatagtcttgatccaaaggtatccgttcctgtcttctacaatacgctgaatcttacggggaggaatatctgcggagtaaaatccgtcatgattatcataggaacggaatttggtaccgtcgaaactgcatagtccgtaccaggtgccgaaccatacaaatccgtcctgccctttcagtgtacaattgacgatattattgggtaagcctcgttcggccgtataatgttcaacaatcatgttagggtaggcaaaagcacagattctcgtcatcaagagaaacataaatataaaaaagaagtgtttcttcattgtatattatattagtggaaatgaatcttgcatcaaagatactattttatctttaaaaaagaaactgaattttataacttatcttttttatcatcgaagatattcattgaaatttcgcgagaatttcagtgctaaagctgaactggaaacagccccaaagcaatgatccgaagcaaagattcaataaaagcgaatgtcatatttaagtacttacattaaatgctgtatttcgatctaaactacctcatttttcattctcaaattccagtaaagtctaaaaatccagtattaggcttttcaaaaagaacaaaaggggtaaataaacctataaaaactcatctataagctttgtaacgcctatttgcttttttagaaacacgattcttgctaccggttcccactatgttcgggaaatatttcatgataggatataaaaacagagcctgtttaaggtttatgtatatatatatcaccattattccctttccgtgagaacttattttcttcatttatgcatttttgaaaaacctaatatggacttttagactttactggattttgaagtcccgaaattaaggtgtcagcaagccaaaaattagctattagcaaaaccagattagctattagcttattcatttttgctaatagcctatgttcgatataactcaggtctgaaagaatgaagcatattgatctgtcattcagtttcgaccaagctcacttttctattccaaattcagtttgttgccgttccacttcatccaacacccgttgtcgttcttcttctgtcagttgcactttgccgtcggttgcattctcggataaagtagcttttacagttaatgagggtgtgtcctgactaatacagtacttctcatcataacagaaaggaagctccgtaggaacactttcaaattccatttcagcggcagtcggagcctgagtcccttcaaattgtacatgagctttcactttaatcttcccggcttttcgtgtggaacggatcagcagaggagccgaaccgaattctacggcacgagggttggcaccgatccttgcgtcaccaatgatttctccttccccttctaccgtgaatacgatattttcctttgccagacgacgaacgtttccgctatcgtccgtcacttcggcaactactactataaaatccgaaccgtccgctaccaagtttactttttgagtatctgcatacaagcgaagtttggtagaccggcgggaaggcattttcttttgggtacatactactttcccgtcgataataccttcggcaaccatatttactttctgccagttcttttgagtataactgtatccgcgcgcttcccagaaatcccatacattttcgaagatgacaggtgcgttcggcatatgccctttggcatgtaccacaggtttggtccatgtttttgttccatcgtagatagaaaggcggatggagtcacagttactgaataccactacatccttatcggagaattgtgacatttcatgagcaaggaatattatcggtccgcattctgccaacggatgttggaggcttgccggagattggctgcggaacatttcatacgcatactttttctgacggaaagcgtcataaatacctccccagtatggatcggggtgataaccacgctggtgatcgaacggatgccactgtgtgccaccgataaactgaccggtagtgcggtacatctcatcataacttttagccagagaaagtgcctgtatcagcagcggacgttcaccccaactgcggcttgcacggttattgttgttgtgggcataccagtcatctacgttttctccgaattcacgggtgaagatgcattgttccggtttgtcctccttttcgtcatcacccggccagccgtagactacatcgtaatgttcctttacaccggcagaatgcacatcggcagcggctattggacgtcccggatacggatattcttccttcgtaatttcaagtgccttcagtgcaaagtcgagcggatagcgagtctcattcagaatgggttcccacatcagcacggaaggatgattgcggtcacgacgaatcatctcacgggtattctgatgaaccagttctccgaatttcgggtctttgttccagtattgccagccaggagtagcgacgatgacaaacaagccgagttcatcacaggcatccataaaggatgggtcctgcgggtaatgcgctacacggatgatggtacatcctgcatcacgcagacgctttgcatcacgccattgctgtgaattgggaagagcattgcctacgtatgcgaagccctgatgacgattggctccgactaattgtccgaaaggttttccattcagccagaaaccctccttgccacgaaattccgccaggcggataccgatacgggtcgttcctccgtcaatggaacggtttcctttctttatgcgggattgtactctatatagataaggagcatccggtgaccagagtttcggattcctcacttccatctgctgacggattgatttcttttctccggagttcagagaaagtttgccggacgtacgtttgataacgttgccttcggcatctgtaagggtcgtttctatagtgacggattccgaacgggtattatcgttctgaatctccgtttctacatatacttgtgcgctcttttcgctgatcttgtcaaagtgaacgaatacgccgccaccgccaactgtgcgggagtcgatggcatcggtaatggcaaccggagatttggcaatcatccatacatcacgatagatacctccatgataagcaaaatccagtgtgtattggggctttccgggagggtatgatttatcgttgctgttgtcggtatagacggcaaggaggcaggagtctccggcttgtacgccgtttgccgtcaagtccagtgtgaaaggcagataacctccaagatgttcctggacacgtttgccgttcaggtaaagtacttgctttcccattgccgcttcaaaatgaaggagtacacgctgtcctttcgtcgcggtgggaactacaaaatgcttgcgataccacgcaggaccctgataattgcggcaaccactgccttcggcgggcatcagttccactgtgtgaggggtagaaacgaccttccaggaacgatcgtcaaaatttacagcttccgccccccggatatcgcctttgaagaatcgccatcccggattgaagttatatacttgtcgcccgcaatcgggaagcggaataaatccggcaaccgatgtttcgggacggtaagtatctgctgcctgcccatcgaaggagaatagcagtagaaatagggataagattaaaaacggtcttttattcatagtgctttttatttatgtattcttttttttatttttctatcattataacaatgtctttctttctgctttccggtgatactttaagatttgttacttttccgtcttttaaagttgcttctaccgtcgtattgcccggagcatggagtttgaaatggacgttccattctttgggccaggcggggaacagaagtatttgtgttccattcgtttgtaagagcatctcctgaagtcctatcatgccgctacctccccagttgtggtcgggtgtccagtcatatcccggtccccagaaggcaggaaaacggtggggaccatctgatagctttgccagagaaaggcttttggcttcttcggtcagccccagacaggctgcccagatgttgtcttgcttccatccggtgtgggagcggaatttgagtgcgtcgggatcatagaaatacgtatcacgagctatttccagattttccttgcctactccgtagatgcgccagggaaaaaccgggtagagttgtggtgtctctatattgttgattcgttcccagcttttggcgggagaaatcgtttgtttccatgccggagtcatggtagaagcctgaagattaagagaatccttgacttcgatataacgtaatggaaccggaggaattgtttccagcatcttttgccacttttcgttgttgcaaactttgatgtaagtctccaatacagttcgcagtgcggcgatggtgctgctggcgttgttggtcatcttgtaagtttcgcaggcagagccggggaacaatatcaggtgtccgtcaccatccagtgctttgcgtccccgacgggaagcgagtagccgataatgttcgtcgaaaaaggtcagcgaactttcaatcaaaggcaaatacggagttatgtcggcaccggcataattcttcgtttccagaatcatctggcaaaattcaagaatagtatcccattcatattccagccacgcattgtattccagtcctttgtcaaaccaagccggacgtttgaaaccatattctgcgggattgggtaagccgaagttttctatctgttcacagaagcaggctccctcgtgttgccaatatacatggctgcggagttccgcattcttcaacatccggttatagaaattgaattgggaaggcatcatgtcgaagtcaccgcttttcagcatcggccagtagacaagacgctgattctgtgcagtcattgttcctcctccccactttcggtagtcaggagtgaatgcctgcttctcgtctatgtggcagggatcgaaggtgaataaaccaccgttgaatttggtagggacactgccataagcattgcagcccagcatatagcggaaaagagtgtagttttgggtgatttctttcaatgcatctttcgcgtcgctcttttctttatttccggtttctttttctactttgctgttctccttgttttcggtttcaccgatcgtttcgataaaactccgttgccagaaagcattccaccataggcgggtttgttttttatcctgtgataccactttagacgatatctttccttgtggggcaattcgttgccaggctgttttcagaccttgctcccattgggtgacggtttccgtctgttctgtgtgtaacacaactgagaaatgatgctttttagaagctttcagagaacgaaatccccaggcgcggtaatcagttccggcatatacactgtctgaagtacctgtatattccaaattctctcctgacaaataccctccgaaagtcagatttttgagaggattcatcatctggaacttcacttcattcatcccttgctgggcaactgctacatcaaatactgtctcttccgcattacgatgataaaacaaaaggcgtttactatccttttcggatgaattctccaatgaaatgaagtcggcatgcgtcatcgttccttttggaggagcccacttataggaacattgctgcccctctccttttctgatcagccgatcctggtatctccagttttcataaaagatttccgcctgcaaagaccggtcattaaccacttcgatgtgtactaccggatgaaagacatctgcccagagttgtacttgtgtcccttcggcagagatttcaacataaccgtcgatcagctttaattcctgccggaaatcctttgcgtcttcaaaaggattgggagataaccggaggcgaaaacgtccctgcttcaactggcagttgttttcatcgaacgtaccgctcctgctcagataaaatagtatatccccctcctctacccatatgttcatgccgatatctcccccgccgcatggcatcgattcggaggaattccggctgggagtatcccaaacgacattggcatgctggctccaaagaaccgacacgccaacgaatatcattgctatagccagataaaatctcttcatattttcaaattaccaatcgtccgaacggaaagaccccaacggcagcccatcacaatatacatctccttccacataattctcaaatccatagcggacagctaccggatgcggaactttatcactttttactagcattttgctgcgttcgatccatgctttcgccgggtagaatactttgtcttcacctgccacctgaaagtttttcgattcgaaacagtttttaccgctgatccacatattcgcacgttcaaagctgacgacgacagtatcattcttgatttcaatacttttgtaataaggactttctccgttcaccccctctactccgtacgtctttgtcagtgcaaggagtgccagacgttctccggcagcctgtttctttgcgggatgaattcccttttccattcctgcatccagcagtacagccatgccgctgttagacacacgatgttctacctttgcctgtgcttctcgcaaataggctgaattaatcacctctttacctttttcagtgataataccatagtcataaggagctatctgacaatagtagaaaggaaaatcaccttgtttccattcggcacgccagccgttaatcaatgtggtaaacatatccgcataggtatgggcacgattccagttatcttctccctgataccagatcactcctttcatggtcataccgatcaatggatgcaacataccattatagagtacggtcggggtacggtttttcgatttgatatcagcttccgattgaggtatctttgcatctggaaatgctttcagccaatcggcagtcatccatgcctcacaagcagaaccgccccatgccgctactacgagtcctaccggaacttctaatatttcattgaccagtcttccgaaataataggccgtcgcactgaaatcacggacactgaccggagccgcttctttccatgaaccgactacgtcgttctgaggggtaatggtagaagttcgttttaccgtaaacaggcggatatgaggatttttgctgcgaagaatatccatattggcattctctacaggttggttcttgaatcctttcatcggcatttccatgttgctctgaccggagcacagccataattcgcctatcagaatattattcagtgtcttttgggttccatcgtcgaaagtgatggtatacggtccgccggcttccggagtggagactgaaagtttccatgagccgttcttgtctgctgttactgcatattgttttccgttccagccggtagtgactgttactttcttattcggagttgccgttccccaaaggttggcattggtttgttgctgcatcaccatgccgtcagagaaaatagcgggaagtttcacttccgcacgcattgacaggcaggcagcgagcagaaagcttgctaatactgtgcttgttttaattcctgaacttttcattcttatttgtttttattcgctacttcaaaattcaaaggtccgagcaatcctgcaggaagcagggtgttttctgctctccggtatttggcattcgtccatattccatcgaaaggagcttttccttcatcggctcctttgagtgcattcgcccaagtattggtcacttcgatttccagttcattcacacctttctttaaggctgccgtaatatcagcccgataaggagctgtccatatcgttccgcaatctatgccgttcacacggacagtagccagatcacatacttttcccagattcagatatacttgttggccttctttcactttacttttccagcggaatgttgttttatacactgctgttccggagtaatagcgtatttgctcatcttcttctttgctccagtcaaagagttcctgtctttggatagtcttaccgtttgctgtaaaagtcacggtatattctgttgcttccaagcctgtctccgaaggttcttttaccgaatccttcttttccttgcgctctttttccgaagtttccttatcatcttcttctgcagggtatacgatgaagacagactcattcggagctaatgttaaagtgatttccgtacgatggcttttttgttcgtaaggaatgtcagcgttaatctcacccgtcactggattccagcattccggctttctgccgtcgatgcgcatactggcggtaaatgtacgtgtttcttccagttggttggcgataaaataaatatccccctgttctccttgccgatgtgtccaggcaatgttttccggtacgatcagatcacgttccagaccgtatgaggagaaatcatcttctttatatggaagagaaggaatcagtatgcctgcttctttcagttcatttatcttttgttttacttccggagacagttctgcggggtccggattcatcggacgtggaagtggtaatactaacactttgtaactggctccacccggtaatgtcatcctgccgttttccgctttagccaaacggagtaacgcgtctttgttaaagctgtcataagcatatcctcgaagtggatttacccacttttcaggatcagccatattggcggaatgtgttacgcctagaggacgcacacgtaagggttgtccttcgtttgccaaacggattcgttcgctttccacccgctctgcaccgaagatgcccggtaaagaaggaactaaacgttccggcaatatcgaacgtcttggcatctcttctcctgtaaaaactgcaatatccgccaccggatgcccgtattgcagcaatgattggcaacgggtgatgtattcacagaaagcctttgcacccttattccaccacgtctggtcacgctggaggaaaaggccgataccatccaaagtcattcccggtttgcggtccagccaaggattatggacatatacatggaagaaaaggcggttgatgcctaaagcatagttgcggtccagtaaggctttcaacattcccggatgttcgttccatgttccgcgtacttccgtgaaaccttctgcctggatgatattcttgccgtagatatgcgctccgctgatggcatccagcatatcattcggtttgtcgtgggttgggctgttcagccagaattctcccatgggaaggtctactttctgataatgcagtaatccgtcacttaccatggtaggcgctacgcattcggctgagaactggcaatcatattctttggcacagtcggccaagacttgatagaaaacatcaacgaccagttcacctatcgttgtgcggacatcacgcagaatcttttcgcttcgttcggcactctccatcggaatacctgccaacaatggtaaataaggcatcaggtcgtatccacggcgtttccggaattctgcggcaaaagtatcgctccagttctggcttccgcattcccaactatccacgtgcatgtattttaatacacggtgggcaacgtccggatttgtctttacaaatgcttgcgcaaaccagttgtcgaactgcttgcgaacagctcttggattaaacttatcgcattccagtccttttcctcctccggcagttgcgttcgtatgtccggtggcggtatgtcccatgcggagtagtttccactttcctttggggagagtagttgtcagtgttctttctttaaaattgtcgctcggactatttttaaagggatctgtcaggttgataatctgtgaaagggcatagcaatcttgctcccctatttcctccttcttcgtggaggaagctacacgccataccagtccggctttaccttcccactgatccagtcgggcttcccgatgcagacgcagttccttgattttcagatttggtttccattttgcggcatccatatcttcacttcccggttcactgccttcgggtgtccagtagaagcggaaatagcgggcagttgtagcaggaattgcatgagtggaattttcatctgtattctgccatccctggcgtgcggggacgagctgtttcaccaaacggtagttaatcccatcatcacttgccatcactttcaagcggtgcgcctgataattattgccacttagaatgatttcaatattgcggcaggtgaaaggctgttcgtattcatattgaatatagcagggatatgatgaacggatgactccggcatcatccatgttcacagtcttcttgatgtcaatatgatttcctgtggctatattggcacaggttattttggccggcataacgtctgccgcttcctcttttacaggcagggcaaataaagaaatatcttcataaaaaccttcgtatgcctccggttgcggtaagtgtagtcctttgattttgccaccatcaacgattgtatcactccagactaccttttgcatcgattctttcggagtcatccacggaccaccagccaatgcgaaaccatcacaaatatgcattcctaactttaatcccaagcggtcggcttcttccatgctgaaacgaaccatttcccaccattcgggtgttagttgttgcgcctttccattgtattgtggtccttctttgatacctttgataggcatcagataagtacctcccagcccagcacgtttcattgcttccaagtcagccgtaatcccttctttggatacggctccaaacatccagtaccaaaaagtccaaggctttgcttcgtcagacggattttggaattgttcgcgaagtgaatgtgtttgcagagcattggcaggagatataacagtgcatgccaataatgagattgcaaatatttgttgtttcagtcggcttttcattctaatctatatttttatatatagataagacgaaaaacggactgttttgtactcactgtattctccttgctcaaattaaactatttaatttcttaggcagtattgctttctacaaaataagtctcatttcaccgcttcttctattcgggatactaactgcggattactgggacgtgccgcagttccgaaatcaataatctgcccctttctatttattaatacatagtaaggcatcctgtctattttccattgcttacgaattttctgatagttatttattcccaaataatcagtcacatgaacacattcaattccccggtttttcaatgaatactcattcaggcattcctcccattgttctttgggttcactcacacaaatggaatatataatcaaatcatccgtagagaatttgctgcgcaattgttttaaaggttccatttctgccagacaaggaggacaccatctggcccaaaagtcgaaataaatcacttttccacgattcttttcgagcacatcatagacaggtttcatgtatggcatacgtgttgtatgctttgagttctcatggaattcgccatataataaattgtcggaaacaggctgtggattttttagatacgatttggtctgattatagatctgcatcacctgtgcacgtagatgtgacattttaacgattgagtcaaactgtgtacgtttttcgtgaaaagcaagtgtgtcattagtacataaagaaccggctatcaacttagtatataaatactgattcatctcactctcccccattgtagccatgatctcttctattgaaggattctttttatctctgaaagcgatcccataagcaatatatctttctgcttcatcagcaacatcgtataagcgtgccgagagtatacctttagtatatagtctattgatttcaggtaaaagtgtatgataacggtccatctcttttctcgttttaaacaagtatgacataccattgaataacagcgcataataataatcctgcttcagcaattcttcagtaaacagtactacatcttccattggcttgtacttcaccagatactcattcctacgttccaaacgaaaattataatccttttttaattcagcctcaaaatccttaacgtctgattccggtttcatattgtaattctgtatatagtaatatgcactttcagtgaacgccaatatctcctgattaagcttttcggcatcacctgttactttaggatgaaaaagatctttgaagtctatttctacatgtatgctgtctcccgggtggatataaagatgttctgcatagttgcggatagaaacctcccttaatttggcataaaccggaaagcggaaagagaatgaaccatctttttgtatgggcgaacgatactgatttcccatatctctgaaaaatgggataatgagagtcagttccttttcctgaggatagaaatcccggtttagaactttgcctgtaatgactgcttcttcagcatactcttccaatgagggattgctttcctctgtttgtgcagaagattcggactggaaattactctgggctttttgacggcatccggcaaacaacaaggtaattattatcagaaagtataaactgtgtttcattgtgtttgaatattagtatgttcgtaaatctaacatttaagagttcttgcctctaaatgtatgaaattatttttagaggcaagaacttttgacaggttatctgtctcaattttagatatttcacattatatatacataatttgtgggataaacaggccgaatgctatagccaacgtacaaacttcctgatataccagttctttaccaattgcgtcaggatacaataggaaagcaaaataccaatcagccagggaaaataacccaaaggaagagccgtcaggccgatggaacgtccgaaagctgtgaaaggaataagaatgcctactgccataattaagaacgtcagccccataacaggccacgtggcccggctttgtataaatggtatcttacgggtacgtatcatgtggacaatcaatgtttgggataacaaaccttctacaaaccatccggtctgaaacaaagtctgatgttcgggactgttacaactgaacacataccacatgaccagataggtagcaatatcaaagatagaactgataggccctatataaatcataaagcgactcaggtcggatgcatcccatttgcgcggtttcttcagaaattccgggtccatacggtcgaatggaatggttgtctgtgatatatcatataataggttctgaatcagcaaatgtatcggcatcatgggcaggaacggcagaaaggcgcttgcaaacatcacgctgaacatattgccaaaattggaactggcagtcatctttatatacttattgatattaccaaatgtctttctaccttcgagtacgccgtcttccaataccatcaaatccttctccagcaagatgatatccgcactttcttttgctatatctactgccgaatcgacagatatgccaatatctgactgacgcaaggcgcctgcgtcattgatgccatctcccagaaacccaactgtattaccttgctcctgcaacagagagattatttgcgtcttctgcaatggagtgagtttggagaataaagtggtgtcttttactgtttctttcaatgttgtttcatccatttcctccatttctattccggtaagggagtgcccgatatcaatccccacctgacgggcaatagctttcactacggtatcattgtctcccgacaatattttgactgctactccatgcatatataattgttcgatggcttcagcggcagaaggtttgggaggatcaagaaaagcaagatatccgatcaacaccatttccttctcatcttcgatggcaaaattacagtctttttcgatgaaacttttctgggaaaccgccaatactctcataccttgacggttcatttcctcactgatcttttgcgcttttattttcaaggagtcagtcaaaggatgtatctctccgtcgaactcggcatacaaacagacatcgagaatctcttctaccgctcctttggtaataatttgccgcttcccttgcctgtcttctataacgacagacatccttctgcgtgtaaaatcgaaaggaatttcatcgactttggtataggcatccttcaaatgttccagattcaactctcttacatgagagaggattgccttatccatcaggtttctcaagccggtctgaaaataactgttgaagtacgcgtgacgaagaatacgtttactgttgtcatcgctgccgtctgcattgatatacttctccaacacaattttatcgcaagtcaatgtgccggttttatcagtacaaagtatatccattgctccaaaattctgaatggcattgaggttctttacgattgttttctttttggacatggcgattgctcctttagacaggttagccgtcacaatcataggtaacatttcgggagtaagaccgactgccacagatacggcaaaaatgaaggcttcgaaccagtcacctttcgtaaaaccattcacgaaaaacacgaacggaaccatgaccagcataaaacgaatcaataaaaagctgaccttgctgatacctttatcaaaggctgtagtggcacgatgtccgaccagacttttggctatcgtacccagataggttttattccccgtctcaaaaacaattccttttgccgcaccgctaatcacattggagcccatatagcagatattatccaactctataacacttcccttacgaaactgttgtccccgtacttccggaaacttttctatcggttcggactcacccgtcaatgaagcctgactgataaacaagtcttttgaatcgatgatacgtatatcggcaggaaccatatcaccggctgccaggtacacaatatctcccggaacgagttctgttatatcgatctcttcttcctgttctccggcacgttttgccagacaagtgttttttaccatcctcattaaagaatctgtagcttcacttgctctccattcctgccaaaaacgaagaatagcactgaataataccatggacgaaataatgattacccctgcccattcttgctctccgggttcagccatcaacacatccagaaacaaggatatgatggcaagtcctgtcagaacgcctatgaaaggattgataaacgttctgacaaacagtataaacggattctttttctgttcatggatgacttcgtttcttccataaatggattgtcgctcctgtacttctctcagcgttagtccaagctttgtagtctgcaaacaggaataaattgacttaccgggttgcgtggcaaccaaaaatactctctctgaattgaatgtgtactgtgatgaacgcagttttttcttccataccatactctctaatttttttaagttactaactgcatttattaattcgatgcaaaagtaaggatgacttcgggaggaagccgttagagaatgattagagtggtattagaaaactattagagtttcttagatatgcaggagttttaccacaaaggtagttccctcgtccttatgagaagctacggtaagttcgcctttgtgaaggtggatgattttctgtgtcaaaaccatacctataccatttccgggagctatattcttattgtctccccggtaaaacagtttaaacaggttttctttgtctgcatcggacattcctacgccattatcagacaagcggataatagcccattgttcccaataagctatcaggacggatgaagtccggttggaagagtacttgcagttattctctaccagattcacaaaggcagtagtcaacagatagctgtttccaattacggtcagcacgttatcttcctcagcttcctgctcaaagactaattcgatatgataatccggatgggcttttaagactaattctctggcatccagcaacagttcatccaaccggacctcttccattgtaatctgttccgactgatagtcggcttttgcaagattcagcaatccgtcgatcaggtttatgatccgtcgggaatcttgtagtgcattgccgatagctgcctgatattgtccggaggtgcgttctttcaacagggccagatccagttcggctgtaagggctgccataggtgtacgtaattcatgagatacattgctgacaaacatcttttgcgaattgaaggacttctccaaacgttccagcagtgcattgaatgtaatactcagttctcctagttcgtcctgttcgtttttcactggcagtcttttgtcgatatgtgaagcggtgattttctccgcttctttcacgatattgcgtataggctttaaggtgcttcgggagaggatataaccgacaatcaccaacatggtcaatcctccgataaataacagaatgagcatatttctcagtgcatcccggttagcgtatccatagccatcataggcagcggcagtgacaatgtagtcttgtccttcaaacggatacacaagtcctattgcctgatattcgtccacatagaaactgatattctttcgtttcagaatacgttttaccatttcgggtgtttccttgactatgtcgttttgaagggcatcatgatatagtattttaaaatctgtagtatagacggctacctctacttcattaataaacttctgattattcaggtaaatagactgcatcgtttttgcatctacctgattattaagaaataagtgggctttggttatagcttcactttgcaggtttcgaaagaaagcattgctgcgcgaatgctcgcttacgtaatagacagctatgacaaatgcgaagaataccgcagctgtaatgcccgcatattgcagagtcagcgttgcccggattttcataatttgtcagtcagtatgaaacccatccctgctttggtatgaataagtttcggttcaaagttacggtctatctttttgcgaaggtagttgatatatacatcaatgaagttggttcccgtatcaaaatgtgtgttccatactttctccgctatctctacccggctcaataccctttcggcattttcgaccatatatagcagcaggttatattctttcggagaaagtttaatggaaacgttatttcgttctacgtccttccgctgaagatcaatgcgcagatccgcataaacaagttcctgcggcaattccggtacatttcccgagacacgtttcaatagaactttgattctggcattcaactctctgaaatcaaagggcttcaccatatagtcgtctgcaccggcatcgaaaccgtccagcttatcgttcgttgatcctaatgccgtcaacattaatataggaatacggggattggacttacggatttctttcgtcagctcaaatccgtccatcttaggcagaacaatatcagatataaccagatcgaacgtatgtgcctgaaaaagccgcagccccattaatccgtcataagctaccatggtctgataaccattttcttccagcccgttcatcagcaaacttgccactctgggttcgtcttctataattagtattgtgtacataggaaagaactcgttaatctgaatctataaaacgaaacaaaaataatgattattcctcacttatgactcttttaaaccattttatatttgctatatttgcgcaattatcatcagttgaacttatgtcaggtattaaagagttagaactattattatccaatatggagcctgtgttggatgagcgggattttgttttttgttctttcccaacactcgattgggatcaaatgcgggagctgaacccaatcgggattttccatgagaaagagggtgtaaccttcattcttgacaggaaagatgctgtagacaaaaagatagattacctgtccgtttacagacttatcactctcaatgtacattcaagtctggatgcggtggggctgacagctgccttttctgccaagctggcagaaaaaaatattagcgctaatgtggtggcggcctattatcatgaccatatctttgtgcctgaagagaaagcggaacaggctttggaggctattcttgaattacaaaaaaaggtacccaacgcaatgtgagtacctttttatttcatttatttattccataaaccggaaaatgattcgtccgctctgcggaccattcacccattttggctgcgatgacgggccacatagatcagtcgaatttactttattacgtacaggaggaatcacattcaagacagagattccactttcaggaagcgtataaagtaagcggtcacgaccgtcacgcggctgatatactccgatgtaagcatccggagtttcattggtcaggctgatagtaccctctttcgtacggatgttcatccaggaaacactgccgaaatatcctttgaattcgggatatgtgaaggtttcacccggaataggatcgttatagtcgttttcccagacatcgtattgcgtgccatgaatacggttctgccatacacggtagggccccgctcccagccagcgtttactgatcacctgatcttcgggatagtcgaagcagattcccattaaatctaccacgccggagaaattgtaggtataatccagcaccgcttctccacttggattgattgtccattgcgctttatccagattacccagtttataattggcagtaacaatcagattgcctccgtcttcttttacatccagtttcgtgaatacagcagcatcagggaattcgctgtaggtacgatccttttctttcgctttttcgtcatcgtgattataaaactgatccaatgagcggtcggcacgacgggcaccgatgaaacgagggccgttggcaaagctgatcttgcgattgtttacggatacacctttcagctgaccgtctttctttgagaaaatgaaagtatgattcttcgcttttacggtaagttcattttctgtttctgtagaggttaccttattagataagggagaaagcacttcattagcctgattcagtttgttcacagggaaagtccagcgccaaagttcatgaccgtatcggtcgatggctgtgaggaaaagggcatcggcatccggaaggatcgttgttttaatattcagcacacctgccgaatgggctgcgacatcacttccttgtgtttccccttgtttcagaacttgggcagttgtattagaagcatctgttgcggtagggaacttcacctgtttccaaaggaaacggcaagtattcagattcagataatcataacggttttctacggagaacttaccgtcaaactgcttgtcgacagaagtattcatgatttgtaccggactccataactgcttgattgtgtagaaactgccttccttttcatgatgtggccctacaataccgtcagcgccgaaatttccttgattatcaatgaatccctccatatcgacacgcttcactccttcgtctgccagtacccaaaggaaaccaccgatacagcggggatgtttacgcatcatttcccaatagtcgtataatccggcaccatgaccgccatcatacaaaccgtggagaaattctgtcggcataaagatttccggcaagcgcatatagttctgactttctccgtaagaacggtaatgcatggtttcaaaaccagagaaattgccttgcgggtgaatcaccggacgtttctgcggatcgtacttgtgaaattctccatcgagttcggtattccatcctttttcattaccattactccaccaaataatagacgggtggttaacgtcacgttctatcattccttcgatcaggcgtactccggtcggagtatcgtatttgccatgccagcctcctaattcatccatcacgtaaagtcccagagaatcacaagcttccagaaactccggatcagccggatagtgactcagacggacggagttcatattcatgtctttcatcagaagaacatcttcgatatttttcgctttacttaatgtacggccactttccggacggaagctatggcgattgacaccacgcaccataatgcgtacaccgtttacgtataatccatcactttcacgtacttcgatggtacgaaaaccgaatgtttctgtctcgctgtgcagcacttttccgcctttgtccagcaaagaaaactgagctttataaagattcggcgtttcggctgtccacagagccggatcagagacattgagctgtaaagaagtccagtctcctcctgcttttacaggtacggtcgtttcagttagttttttgcctttattatccaaaatctgtgcccggatactcattccgtcattagacagattggtatagcaattggcacggaaggaaccatccatttgtgcatcgatggcgatgtgacgtaaattaatcgcaggttttacttctaggaataccggacggaaaatacctccgaaattccaatagtcggcacgtcgctcggcaagattcacactggcattttcgctttcctttgaaacggttacttccagcaggttcttttttccatacttaaggaaatctgtgacattgtatgaaaaacgatagaaagctccctgatgtttcgagccgactttacgcccgtttactttaacttcggtatctgtcatcgaagcttcgaataccagatttacctgctgtccgcggaacttctcggggacctcaaactcgtacttatacattcctttttcatcggcgataccttcggggaaggctttgccatagaaggtgattccatactgataggtgccaaagccctgcaactcccagcatgacggtacgccgatcttcgtccatttgccggaattgcgtccgtcagtacagaagaagtcccattctaccatatcatcacatccgtgaccggaaaggtattgccgttccgtttgcggaagggtttgagcagccagagtagttgccaacgccaaggttgataataaagtggttacttttctcattgttacttttattattgtgttagttactatttatttgaatcaattcttattttactgcttgctgatgcgtatatgcagcgtatgttcttttttctcaatagcatacttcttcagtacgcccggtccgcagctgctattccctaatccgagcacggccgcgtccatactgagaataatttcgggacgtggtttcagattgcagtcatgagtttctttatataaatcctgtgcagtataatgcaaagcagaggcagaaaagacatcttctaccgcgtctacacggatacctttattctgtttgtctgtcagcgtaagaaattgtacttcttccttatttccgctatcctgcggacgaggataatgtacatactgttctgctaccgttcccttccagagccctgttgcggcagatgtcttgcgatcgggataattatcctgtggtcctctgccataccatgtaaaggtattataggcaggagccagacagaatgcaagtcccaaacgaggcaattccggaaatactccttgtggtaagaaagttgttttcagatcaatgactccatcggaagaaatggtatagacggatgtcgttgtcacgttgccttctttatataaattagtcgtccggatacgtactatgactgccccatctgcacgtacttcatgatcgaaagactccagactaatcagagggtggtccatgccatgcagttgccagtcttttgccagccagtttccgaaactcttgtcattgtctgtcggtgcacggaatgcttgcgtgacaggctgaaccggaaaatgattctgagtcaatatttctttgccattgtacataagggaagttatacttccgactgttttcttttcccactgaaccgagaaaccgcgtccgctaaccgataaagatttatcatcctcttttacttgcagcgctcctttattgatcagatcggcagacaacaattctccttgctgtaagcagaattgttcccaagtaacttcatgaccggcttttgcccaaagggcatcagatttcaatacgatgcttacttttagctgacaatcagaaagcatattcgttgagttgctgttgttgctttttctgtttaaagccttcttgtccgataaggaacggaaagcaggtaaagtgattgtttcactctcacccggagcgacttccggtaatgtgatttctccctgttctttctgtttaccatctattgtcaatgtccataagcagcgatactgagataagtctatatgatgattcctgtttgtaacgatcaattgtccattgttgacggccaactgaaccggtgcatatactttctttacttcccaatatttcggagtcgtctcacgatcactcatcaatagaccgttaaagcagaaagctttcagattcggtttatcaccgaagtctccgccgtacgccaccataatgcggccatcaggcaattctttataaattccctgatctacccagtcccagatgaaaccgcccagcatacggggattgctatatatttcatcccaatattctttaaagttgcccaacgcatttcccatcgaatgggcatattcgcttgtcatcaccggacggtcatcattggtacgttccgctatttccaacagccgttcccaacgtgcattttccgcacgttctttgtcttctccttctgcaatacccggattcagatattcttgtttcacacgggtataaaaacggctgatcacatcgaccgtcttcggatcaggattgccatctactccctgcgcaccttcataatgaacggggcgtgtaggatcaaaatcgtgtaaccatgcagaaatagctgcaaagttcggtccgtagccgctttcatttcccatactccacatcacgatacttggatagttcttatcacgttctgccatgcggaccgcacgatccatgaatgcagcataccaatcgggagtacttgccagtgtcccgcgcagaccatgctcttcgatatccgcttcatccatcacataaagccctaaactatcacagagttcataccagcggctcacattgggataatggctggtacgaacggcattgatatttgcctgtttcatcagcagtatatcctgaagcattctttcttcactcattacgcgtgccgtccgtggatcgtgttcatgacgattcacacctctgaagcgaaccggattaccgttaatcagtaattgtcctttattgatttctacagtacggaaaccaaccgattgctccgcctgttctatcacttttccttccgcattctgcaaagtcaggtgtaatttataaagatagggtgtctccgctgtccatctttccggtgattttattatggctgacaaacgtcccgtcttacgtggcccgcgttgcggataccactcattcatccggcttgctttgtgctccagatccagtatctcttccacctctccctgcaactttactatctcttttccacttgcgtctttcagcacaccttgcagggtatatccttttccagtcatacctctgtatacactaaattgcggatcgatctgcaaaataaagtcctcataattgccagcagatgcaggaagagtgcgtatcgcataatcacgcatacgaacatcaggtgtatgtatcagatgaatgctacgatgaataccgccaaaacgccagaagtcctgatcttcgagataagacccgtcactataacggtacacttccagtgctatctgattctcaccggtcttcagatagttggtgatgttaaattcacttggctccatactgccttgactataccctacccgttcgccatttatccagacatagaaagcactcatcactccttcaaagcgcagaaaagtctgtccgtccgcttcccattccacaggccagacgaatgtgcgccgatactgtccgaccggatttcgttctttataggtcgtatagtcggctttcggctctcccattacccgtggaggatctatcttaaacggataacctgcagatacataaataggcgtgccatatccgttgacttcccaattggcaggaacaggaaagtccttccagtctttatcattaaaatcagtctgatagaaatctatgattctttcgcccggaacaggagtccatcggaacttccatgttccgtccaaagatatcgaacagtctcctttctgtacggaaaaaggagtaaaagcagctcgtgccggttcacgattgatctggagaacatgatgattctcccagtcatgcattgtttgtgcctgcatcgggcaagcgaccaatgcgccaaacactaatgtatatattttcattcgttcttttttcttcataccaagaagacggacgaaggggcattttgtacccctttcttttacattaatattaaagaataataaaaggagaaacactctatgaagaaaagctctaccttgtgacctataattacttctaatatttttattatgaaaaaactactattcagcagcctctttttattcagttgtctcgcttcacacgcacagcatgagtatacgattgaaggtgatgtaaaaggagtgaaagacggcactcttgtttccctgtttttaacggacggacgtgtaggaagcgtagttgcttcggatacgatacgtaatggcaagttcttcttcaaacgaaatgcaggagaaagcggtatggatcaattatcccttatgtgtaaccgcgaagcggattttccttcgatgtctttggagatttatgcaactcccgacgctcaaataaaagtgacaggcaccaatactctgatttatacatggaaagtagacagtccggtaaaagaacaacaggaatataaccgatttattgaaaactcccgtgacctgtgggatgaataccaacgtctggctatcaaagagaaaaaagcggcctctaaaagtgaatatgatttaatagaagcaaaagaggacagcatatcagctattatcaaaaaacgggaacttaagttaatgcaggaactccctgtttctaacatctggatggataaactgttcggtttaagtatgtctgtgaagtacaatcccaagtttacctataaagaagaaacattggctttgtataacagactgaatgaagaacagaaagcttccatcaaaggacaggaaattacagtcaatcttttccctcccaaaacagtgaaagaaggagatgatatggcagacaccgaccttttcgacctcgacggaaatattcatcatctggctggctttaagggaaaatatatgcttcttgacttttggagcagcggttgcggaccttgtattatggcactccccgaaatgaaagaaatccaggaacaatataaagaccgactcacgattgtcagtttgagttcggataccaaaaacagatggaaggctgcttctgcccaacatgagatgacctggcaaaacctgagtgacctgaaacaaaatgcaggattgtccgctgtatatgatgtcaatggtattcccaactatgttctcatctctccggaaggcaaaatcatgaaaatgtggtcaggatatggcaagggtagcctgaaacttaaaatgcgcagatacctggatacacctaagcgcgaaatgagtatcgttcggaaagccaacaccaagatcgttaaccatccaatttacaaatcaaccaataccgacattcttgaagtgaagcaggtggaattgacggatacggcaacagtcgttcacttctatgcatactacatacccaaatattggatacaagtgagtacagatgccaagttaacagacgcaaaaggcgtatcatatgccttgaagaaagcggaaggcattactcccggtgaacatttctttttgcccgaaagcggagaagccgagttctcactcacattcgaaccattaccttccgatacaaaatcgtttaacttcacggaaggaaccgccaaaaaagactggcaaataaatgagataaaacttattaagtagagaataaagaagaaactaaacctatccttcttttttctttattaaagattcaattgaagacttcgaaatagctgcatattccgaagtcttcttttttatttcatcaatcgattctaaaagttataattaaaataagaatatcaattattaaaatgcaaacatcgttttaacaattaaggtcttgcgaattaaaatactccttcagacagaagtaaaaacagaaatgaatatcgtattatcttccgggaaatggttttctttgttatgtattcatatcactaatctcatattctgcattaaaaaataaaaagaaatggaagagaataaacaaacactttacaatgatgagttgctagatatcttacctgacggagttattatatttaatattagtggagaagtaatacagcttaaccggcaagctctgaccgaacttcatgtgcattcatcagtcaatgcaatgatgcctcttccaaccaatatccttttcaaattattaaataataaagaagacattctttctgtcatcttagaaaagattcgtcagggtgaacaaacttattcgctttctgaacatactttcatgcaagaacaggtggattatacacaattcccgatcagaggtgattttgcaacgatcaaggaagatggcaatctgaaaaagatattattcttttttcgtaatatcactgtagaactgacacaggagtatattctgaacacagccttacaaagaaccaggatatatccgtggtattatgatataaaccgaagtgagtttacccttgacaaccgttatttcgaacatttgggtatttcggccggagaaaataacactctgactatggaggaatacgtaaatatgattcatccggacgatcggcaagctatggctgacgcctttattgtacagcttagtggcatagaaacattcgataagtctgtccctttccgcttgcatcgtggagacggaacttgggaatggtttgaaggacagtctacttatattgccaatatttcggggcacccttatcggttggtcggtatctgtatgagtattcaagaatataaggacatagagaataccttaatcgaagcacgtaagaaagctgaagaaagtgaccggctcaaaatggcttttctggcaaatatgagccacgagattcgcacaccactaaatgcaatagtcggcttctctgatgtaattggtgctacgtatgatgaattaagcgaagaagaacgtgccgattttgtgagactaatcagcatcaacagcgaacacttggtaagactgattgatgatgtacttgatttatccaagattgaatcaaataccattaaatttacttttactgactgttctctccagtctctcatgatggatatagagaaagaacaggcaatgaaacctatatcggaaatagagatcagagcatcattacccaatgaagatgtctatattaacacagatgctacacgtctgaaacaagtcatatgtaactttattaataacgcccgtaaatttaccgaaaaagggtatattcattttggttatgcggttgatccagtcaatgcagactctgtgaatatctttgtggaagataccggttcggggattcctcaagaatgccaaaaagaaatattcgaccgtttttataaagtagatacttttaaacaaggaaccggcctgggactttctatctgcaaaacgattgtggaacatttgcaaggagacatctctgtagagtctgaaatgggaaaaggcagccggtttatcgttactcttccatttgaaaggcagacagaagattaatgtcctctgtattcctgcggagtgacaccggtatgctgcttaaagaatttattgaagaaagagatattattgaatcccaaagacaaagcgatattcttcacaggttcattacttgactttaaacgagacttagcatccatcagaatgacagaagcaatgacttccagcggggtattccccgctgcctttttaattgttgaacaaaaatgaggcagactaagtcccaaatgatcagcataaaaagaggcaccatgatgaactgtataattcttcatgaccagttgcagaaactcctgatatatctcatattttcttgattgagtagataaataccgattgctctgtagcttataaatctctgttgccccctgaataaacatagtgagtacagcctttacgatttctttattggccaatgtcttggcagaagcatacgcaagaatcaatgactcataaaacatcttatagctacaggcttgcaatggagacaaattgataaccggattttctactattatcggaagcagatgctgggtggacttcatcagatttatattttctatgaactgagatgaaaagcctgcataataaatatgaatatcagatgaaaactcatgaatttccatgaaataattaggtggcagagtgattaaatcattttcgacaatattatatcgttctccattaattgttgcctgtattgtccctttcacacaaagtatgaagaatcctgcctctattttacaatgaaaattcttatacccattcagtaagtttatcccaaatccttctcccactatataatcaactgttaaatcgtacctcggtatatcgctttccatcgttattttgttttttacttcaaatatagagattatttaaaatctacgctcgaaataattaaaatctgactatcgaatcataaaaaaataacatatatattctatttataggaaaaaggtttcaaaataagaaacgggatgcagaaagctatacaagcttctttgcgtcccgctttttaactactattgcaaaagttcagtctgctaacagatttattgaatatccaaggcatcaaaagccagaccgtccatattttccgctgaaagtaatactttataatgtccggcgttgataaaagttccggtggtggtactcatcatcttccatttgtccggtgtttccgggaaggtcagaatgtcttctttgagcactactccctttgaatcgatgaacttcattaaaacaggcattggttttccggtagtattcatatatttaaagcgaagggcataaacctgtgccagtccggtagagatattccattcaatactgttaccttttcctttatcaaagaatactcccgtttgcttgcgatgttctttcttccggaacttgcctttcagggttgccgtttcagcttcatacgctacactgacacgggcattcttgtcttcgggaagcaactctttcggagttttttccatgacttctttgccggccttttcccaactccagtcggatgcggggaatacagtaggttgcagattcgaatcaacagaagcaatggcaatacctgaaatcagcccctgtcctgctttcacttccgggaaatgaatcttcagtactccaccttttactgtagcgtacactactttcttgcatactccgtcgtgaccactctctgcccaaatatcaagatcatccaatactaccgaatcatttactgccacatcgaagatgcgcaacccctcgcagtcggtggaagcactgcctcccgtcccatgccaaggctctgtgaaatagagttcaatccgatatgttccgtcagctaccgggaatttgtactccagttgatgacgtccaaaacggaagtgctggaacaacttccagtcacggcttccccgaatcggatcattcgtcgtgcgctgactggcaaggtatggattcaattctttaaagttcgctgcccatgaacgggaataatgggtattatcctgcatccataactgaccgaaactatctgtatagtcgtctcctccacagttaatacggtacaggtaattatatccatcttcccctttcaatacaggtttcgcattctgatacagtacgtcaaagtggggagcttgctccagtccgttgagtacaattatgtcttcggcaaccggcttccctttgtaatatcctacagcacgaagtacattataacgaatatcccgattctcccacatgaagtgggtgcctgttccattattctttttgcgtcccagataagtcactttgtcattgatcatgtcgttataaagcaatacggaatcacaattgctgtaagcctcgatagtagcccgacgacgtcctttctcaaaacgatccgcccaggtatgtgataccaggtataccatcgggtcctttgccgccggcacatagttggcacgatacatataatatacatccagtggttcttcccacggagtcaccagtcctttatagttgaacggacctactttatctattttccggaatgcttcatccggctggcgacgtccgggattgtcgtggctgctgaaaatccattggaactgtccgcaaacactgtctttggcctgttccgccagacgaatctttgtttccatcaactggcacatacgactttcgctccatactccattcacttcaaattcgccgggttccgtatgcagatcaatacttctccatgcaccgtattctccattcagcaactggttcttctgcgaaagttcctttccgtatttcgtaacgtctcctccatacgtgccgctccaattctgaattacattccagtcggttccttcaccgccgttacaggtggtgatgatacgcatcgtacgtgctgtcgggtccatttcgcgaatgatttcactgcattcctgtgcaaattcacgaggcaatgtactttcattctgtaatccccatatcactactgacggagaattacgtcgctccttcacccattgacgaagcagctttttaaagttctctcgaaactccggtgtgtcataccatacatgggcagaaagttgtgtccagaacaagacgccttcttcgtcccaatatttctgataatcgagatgatggggctgatgggcatcacggaaagcgttgaagcctgccgcacgcatttgtttcactctcgcagctacctgctcccgactgaaggcatgactttgcccgaactgatgctcatactcgcatacaccattgataaagacaggctttccattcagatagaaacgcccatcttcgtcattcctctttaccggccaactgattgtacggataccgaaaggcgtagagatctcgtccgttgttttggtatcacgcttaatcatacttgccaatttataaagatagggattctccgtatcccataaaactggattctctacaggagactgttggcgaatcaccttcatctctcccggagccaatgttacctcctctacgagacggaacacttgtttaccgtccgcattgctcaacttattgactacttctattgtctccgcagtcttgccatagttctttacttctgtttcgacaaagacattagccgccttttcgtcattccagatgtgtactccgaagggttcaatacggatctcatctgtggtctccagcaccactggacggaatatacctaacggctgagatccctcactgaatccccactccgacgaacagccaccacatacccacggcatatcggctatcatttccggatgctctacttttacttccagacgattcattccttgtttcaatgcatcggtcacatccagtgtcaacgtggtacgtcctaccggataacgtccgaaatcatgtccgttcactttaatagtagcatacgtacctaccccctcaaaacggaggaaataacgcttctttaattgagaattgacagttgacaatggacaattatcgagggagaagtctttcacatacatggctgttccgtgcaggttgccatgagtcagttggcgataaccgtaatagtcatcccaattatgaggtatttgacaattaataatcggggattggtgattgccttttgaattgtcaattgtcaattgtgaattgtcaattaaccaggttttccagccttcattcagttcagtgatcatccggcgattcttcgtttccggcttcgggaagcgaacggcagagcgtcccatcggcttacttgtagcaacagcgataccacgctgttcggcattgttcaccgcgcagtagaaatgataaactactccgtcgtgtttgatcacatagcttttgtgcgcaaataattcgtcgtaattcttggaaggaataatcaaatcagttccatgccagtctgtccagttaacgagatcataactggcagcaaacgtattaaaggctttatacttgcgtgacggctcaaaggctgagaaataaaacatcacgtacacgtcacccatcttctgaatatgagcatcaccagtgattgttccgtccgcttcgtgtgcaaagaccggattgccgggataacgtttccaggttttcatatccttggacagtgcgattcctacccgttcaccctttaaatcagtttccggatgacgtcctcccgcattgtaaaacatcacaaacggagcacccaatgttttgtctttatcccagtaaacggtacttttatattgagtcaacttttcccaccactgcgcatctttatcatggatgctcagaattggcttgtccagagattcccattcatgagcggtggaaatatctcctttggtagatgccagtccgacaaagagtggtgcttttacagcttcataacctgtaccttctccaccgatataagtcatccagtggcggcctttgtaggtctgaagttcgtagcttccaccccactccatatccggcagcgcggggaatcctccacgctgattacaatcccatttaccatcccgataagaaagtacacgtcctaaggtacgccaatcaagcagattatcactttctgcaatccaggtttcgtatccacggccatccgttccggttttaccattataaacgacataagtcatcagccacttgtctccctgacgaaagacagtaggacaatcaatcttatgataattgtcggtcggggcaacagcaagtccgtacttatagggcgtctttacctcttcataaatctgctccatccgttcctgcgtgactttacgttgggcatacagtgagcatacggcagctatacttaaaaatgtcagtaataacttcttcattatacttttgtctatcatctttttgttgagttgccgctatttgtttcaagctttggaacaaatggtttcaaggcatgatactaatagtttcaaagagagaaaccaatagtttcaagccttgaaactaaatagcagcttacagcaatcgttcattagtaaaacaaccagtccatcgtttcttcgtctccggcaagtccggcattacgaactttcatatccgcagtcgtaaatccaaggacctgaaggtagcctttgggcaacatcaacgtatgttttcctgccggaaagctatatgcgtgtacatttgctaatggcattccattgatatggattgcattggtcagtacaggttccgcctgaccgtaatcgttggcagatgcatcaatctccagcttcggagctttggcatacttcttctggtcgtctttaaagtaggctactaatagtttcaccggagcatttgtttcaaaagtaatgcttgttcctttttcccgttgttcatttccattaaagcggaatgccttcattcccttcagttcaggagctattgcttctattttgcccggaagatccgtgaacaaggaagttccttcattcagtttcactgtcggataattcgatattaagttcacatccgcaggagcccaggcagcgatctctaccgtttcagtcaccgcattgccattttgcttttctttcagcatggcaaggttcgccttgaagttctccaattctttttcgtagtgtaccagcagttctttccatgtcttattatggccatcgtccccgccgataggaatacggcgctgggcagtctgcatactgttggcatataaataatgctcgtctgtcagttccaccagtttgcggtaatgttccagactttgttccatcagagggatagcttcttccagattcttcatgtcttttccccactgatagtccaataccagtttcgcagctttcactttcagattaaacgcataggcaaactcacggtaacaatgcatatcattctgcaaacgtgcgaattcttctttgttggaggagatggaaccggctgccttgtcaatcgccgctattgccttatcaccgtgttcaatcacctgagcgacaatatccagcggcatctcacctacatgaggctgattcttccattctttctctacaaattcgatcagcttctcgccttccggtccgcagctttcatagaatcccggatagatggtatatttgtacggattgacaagctggctcataaacatccccaacaataacgtctgacggtttccttccgtgataccaaaacgacgtaataacttcggggcaatttctccgctttcttcataagcaatgcgaatattgcctgcattctcgtcggatgttccgtagaactgtcccagttgatgattccagtaaccgatctcgtcagcacgatcccggtggctgttccatgcataacgtccccaggtctgataccaaatccagtcgcggtccagttggaattcccgttcgccattcggcagtttatcggctgtatatggccaatcccagtacgaagactgcggataaaggtgcagtgcattggcaccgtgcacgttgtgcatcgcttgtaccgccttctgtacgaagtccggagagccccaacggaatggttccagatttgccaggatatgtacattactgatatgaatagatcctaaagagctcaaatccgtatgaatcttcgaccaggggccacgaggctcgtaagttgtcagtgattcaccattatatttatgcatcgtataaagattcttatatatcggcaatgctgcatccattaccagtttgcagtccgtatcgtgtgcgcgcagcaaaagaggcggttcgtcggtacgtcccaatgcctgtaatccgtcttttacacccggaatgatggtctttgtgaaccattccacatcatcttctaccgtacacatggcttctcccaggcaaaccagcagtcccacattcggatatttctctataaacgcggcaatgcttttacgggtatagtctgcaatcagaggggtgatgggacggttacggtcctgcgttttcagtccataatgctctgcaaatggtttggaaaggatgatattgtagaacatctgtatcacgaagataccacgcttgtccgcttcttccgtaaggaaagaaaacatctcttcattcttcttgaacgtctcttcgtctacttccagcgcaaacggataatcttccagtttgaccaacgatgcaaacggatgaccattccagagatacagggaattcatgcggttggctaccagcatatcgaggtatttaatccattgttccttatcataaaaccaagggaaactttccggagtatacggatactcatacacaccgtgtcccggcaggtaagtcatcttctgcagaccgacacaagcgccgcggagcaccatttccggaccatctttcaactcttccggaaagtcaagcttgccatcagagtcgttcacacggtctatcagttcgcgacttccgtagatcactccgcttccgtctctgccgcatactcttgtcagattgccggtagtcgtaatatgaaagccttctttcttaagcgtcgtatcattcacttccgtcagcagaatcgtctttatttcaggatcggagaatgtggtatccccttgttgcatcattacctgataaccggctttatccaaggtagtctgtaactgttccgcactgaacagaatacggtttgacgcatccggcggagtcattattttcacggtttgcttaccacacgcagctaagaaaagggtgcatgccgcaaacatgaacaatttggtatttttcattcttctgatgtatattataaaatgtataatttcgtccttttataaaagaaagacgaagtaagtccttgtttgtactcatttatccactcttccactttttgataccatattaccacattattcatccaaaacatctgtaatcccctttattctttaaaataatatctatatttgccggacagtattctataataaaaaaagaaaacaagagcaaacaatatggaagggcaattgaatttggactgtgaacgatttcaacaaattactcaaatggcgaaaatgggatggtgggagtctgatgtaaaaaatcaacagtatatttgctctgattttatcgttgatctgttaggacttgaaagccatcggatcagctttcaagagtttcatcacaggatacgcgaagatcaccgcacgcgtctcagaaacgaatttatctctcattcaaatcttgaaacttatgagcaaatgttccctatccaagctaaaaacggagaaatatgggtatattccaagatcagtttcagaaaacctgataaagaaggatacagagacatattcggttatttgcaatacgtggacaaacctgcggaaaacagatgcggaaacatcgacttctttcatgtaaacagtctgctttatcagcaaaacagcatctcctattcattgctcgcttttctgcaatccgataatatcgcggagataatcaatcaaatattaggtgacctgcttaaacagttcggaggagaccgtacctatatcgtcgaaatagacagaaagaaaagggttcagaattgcatgtatgaagctacggcggaaggggtatccgaagagcgggataatctgcaggatatactttgggatgaatctttttggtggaacaggcagatttcaaacaggaagtccattattctgaatactttggacgatatgccccaagaggctcaggaataccgcaagctgctcgaatcacagaatattaagtcactaatggcagttccgctcatatccaaagacaaaatatggggatatatgggcattgatatggtgaaggcttatcgcagttggagtaatgtagatcttcagtggttttcttcattggcaaacattatcagtatatgcatagaactgcgcaagtccgaacttcaagcgaaggaagaccgactggcactggatcatagagaaaagattctccgtaatatctataagaatctgccggctggtatcgaactttacgataaagacggttatctgattgatatcaatgataaagaactggaaatattcggcttaactgataaaaatgaggtcttggggatcaatctgtttgacaatcccaatattccgcaagaaataaaagagaagctaagggcgcggaatgatgtagacttttcaatcaattatgatttctccaaaataaataaatatatagaaactcaacggaaaggagtcattaacctcactacgaaagtaactacgctttatgactctcagaatcagttcatcaactatctgtttatcaatatagatacaacagaaaccaccaatgcatacaccaagatacaagaatttgagaatctgtttctcctgattggtgattatgccaatgtggggtttgcacacttcaatgtactgaccagggatggctatgcccaagatacatggtatcggaatttaggtgaaaaagaagggactcctatgactgaagtaattggagtatactcacatgtacatcctgaagatcaggcggttctgaagagttttgtccgaggagtcaaagaagggaaagctaccagtttgcggaaagaagtccgtgttagcagagagaacgggaaatatacatggaccagtatcaatgttatggtcagagattatcgtccggaggaaggcattatcgaaatgctgtgtatcaattatgatattaccactctgaaagagactgaacagaaactgattatcgcccgtgataaagcggaagaactggaccgtctgaaatcagcttttctggctaatatgagtcacgaaatccgtactccgctgaatgcgattgtcggcttttccagcctgttggcagaaaccgaaagcaaggaagaatgtcaggactatatcaagattgtacaggataataatgaccttctcttgcgactgatatctgacattctcgatcttgcgaagatagaggcaggaacattcaactttgtatatgccgacttggatgtaaatgaggtctgctctgaaattatcaagtccactggtatgaaagtgaaaggaaatatcaagctcctttttgaaaaacaaatccccgaatgccatatctatacagataagaaccggtttatgcaggtgatcactaactttataaataatgcactaaagttcacccatgaggggactatcgctttgggatacgaacagatatcttctcagaaaataaggttctatgtgcgcgatacaggcgttggaatccctgccagcaagataaacagcgtattcgaacgttttgtaaaactgaacaattttgtccagggaacgggactgggactttctatctgtaaaagcatcattacacagatggaaggagaaatcggggtagattcaactgaaggagcaggctcctgtttttggtttacacttccttaccacacaaatgagtgaaaaaaggtatatctttgcacttcatttattaccattattatgcagacttacatagaaacatcccgtttaattctccgcgattggaaggaagaagatattccggcttttgcccgcatgaacgccgaccctcatgttatggaattttttctccatccgctgactccggaagaatcacttgctttttatcaccgtatccaaaatgagtttcagacctgtggctttggcttgtatgctgtagaacgtaaagaagatcatgcttttatgggatataccggactgcatcagatcacatttgacgttgattttgctccgggtatagaaatcggctggcgattggcgcacgaatattggggacgtggttatgctccggaagcagcaaccgcttgtttggagtatgctcgtaagagtttagatatcaaagaattgttctcgtttacttctcttcccaaccaacgttcggaaagggtgatgcagaaaatagggatggaacgggttagagaatttggtcatccgcttgttccggctgagcatccgttacatagacacgtgttgtatcacatagatttaagaaagcattcatcgtaaggtattcagtgcaatgacataaaaagagaaagggagtaatgtatcaataatttatcgattcacttagaagatacagaacttttcaaaatcagcaccaacatctatacgaaagacattgactaatgatacagtaacttccagtcatttattaataaattctttcatcgtttattataaacgtcccccaagtttattataaactaggatttcgttattcccgcaaggaatattaattttaagcaacaaaaagggctgcaattcccataaagaatcgcagcccttagcttgtgtcagactatccaacaagcattacccggagtgggaatgcctgcaaactgttattatattatacttattattgctcatttttcgtctatattatcaatgttatcgacatttacttccggttttcacttacaaagatacaacattaaaagcggtttgtcaagtcctccatgcttctttcatacatccattcagatttattccgtctttataatctccgcaggattaattcgtgccgccttattcacttgccagaacaatgtacctgcggaaatagctacgacaaccaacaaagctatcacaaagatagaaatgcttaccggagttttgaccacaaaatctgatgtatatatgtatatcagatagtatgataatggcatcgtaagtaatgttgcaccgcctataatccatatatatttgcggaacaggatggaataaagattcctgagccgggcaccattcactttccggatggctacttcccgatatcgctggcggatatcaaataacgaaagaccaaataatcccaaagcggaaacaaatatagagatagtagcaaaaagggtgaagacagttgcaatgcggcggtcgtcctgatacagtaccctaatatcatcttttagccaacggtaatcgaactcattagagttatatatgtcttccctgcatttcttaagataatcaactaattgtttttcttttcccggcacacaggatatttgacactgggcattaattcctgcgctggatatcatatatataatcggctttttaccagcagtcaaatgtccagagtaataatcttcaataatagcctgtacaggcatcaatgacaatccaccttctactattttaccattagatatagaactccaaagtgaactttcacctttgacgaatgcatcttcccgacgagtataaccaaaagcttttaatgccgctttgttcatagctaccagataatcggcatgtccatttacttcatcgggcaatgaaccatcaactatatgtaatccatataacttaaagaaatccactgttacccacatcattgccatatttaactttcctcccttatcatttatcatacttgacatgctaccagccgataaaatgccttcgcgaccagtatctccggcaaaccagtgttcaatatatgggcattcattcagcttctgttccataacttctctgtcatgccaccgcttattttgtatttcctggctatcctcccaccattggttaggaagctttggcattaggtcagcatataaaattccttcggttttgaaacccggaggtgtattcagcaggaaatgaagatgattactaaaatacaacgataagatgatcagtaaaagagtgatactatattgcacaaataagaaaagggtgcgtgttttcactgactgacgtgaagtaccaatcgtacttatagacacgactggaggcaaataattgtatttaagataaggataaatcgttgtcagcagtggcaacaatataaatattgccaaagagagctgccaatcgaaagctgtatacataacgttgctttccagcaaacgattggcatatcctgaaaacatctctataaagaaccatgcgaaaaataaagcgatgagtaccatcaagacattctctgtccataactgaaaaaaaagtgtacgacctctcatgccaaatactttcctgatgccatactccttggaacgctttagcataaaaaccaaatagatattgacgaaattgagaatacctgccaaaaggagcaacaggcatacacaggacagtacccataaatgaaatcgactgctgtaatgccacatttccggagcatcggcttttgctgctaatatcttattccaataaagctcactgacaggaataaaatcataacgtatacggtaaccgccatcagcttgacggtagatattactaatagcgttaatagcatctacatccactcccggcataaaacggataagttcaaccagcatctttccccatcctctttctccattcttgagttcgaggtttaaaacgatgtcaaatgttaacgaggatttacatgccggttcatccaatacaccacagacagtgagaagatgaccaccggaataacttagtttttctccaattggattttcctttccaaatacacgctcggcaaactggcgggtaacaagtacatcattgggagctttcattggtgtaccactgaggggatacgtgaagaaatgaaagaaagcggtatctgccgctaataattgtacggtatacggctttccatttatggcaacattatcattgctgaaagttacaaaacgggccttttccttcacagcttccggagaatagaaaactgtatctgctccactatatccatctgatacactacctgcatatacattcccatcaatatcccgaagcggtatatatacattttcagcatctatgcaatgagtatttactcgtgtctcctgatgaatataacgtaccagtatgattgtacacgccagacttaatgacaagccgacaatattaatgactgtatatgatttggagcgcacaaggaaacgccatgcatactttagtgttttcattatattctgttgtttgcagaagaatacttcaaatcctgtgccaaaacataaagcgttatatactagtgatttggatttatcagcatatattctttttgtgcatatacgcacaaaaagagtgcgataatgcacagatagaaagacctccggcctattgccgctatagcaatacaaccggaggccttatttcaatctgaatctctgactacaaacgataggtaacaatcctttcttccggagaatcaatccaaaggcgccatacaccttccgaaaccttctccacagttcccatattggcttttggctgacggcgactctggatggtcagataaccttttccttccgtggccttcactttaatggttttattatccatgtagacatgaatgtctccgttcggagtaggtacggtaccttccatccatttcaaacctcccaataccggactgacagcaaactctttataaccctctttcgttggtttgactcccaaatagtatttacccagcagataaataggacttgctccccaagcgtggcacaagctctttccgtatgggcggccatacatggcaagatgctgtgttccgctttcctccggattatatttctcccaaaaagaggttgctcctgctttcaacattccaccccagtaagctttcatttctttcattacagtctcctgctcaccaagagcacaaagggcttccagttcgtaaaaacgcatataaggcgttgttattttcagaatctcatcattcaggagaacggactgtttaatggcctgctgcttatccgcattcagataatcaaagaaaacagagaacatattagcgtatcgggttacggcatcactctgacgtccatccacacaattgtgcacaaatgcctgtttctgattattccagaaagtcggctctaattttgcttttaacgcagaagctaacttctcatatttttgttgtccgtccttatctccgactaaatctgcacaaagtgccatcgtctccagactccggcaaaacaaaacctgttcgaaagaaagttctccctttttgtctaaatagccatccgcccagtccacaaatacccagtcgccggacattccttccaccataccattcttattcgtacgtcccaatacataatccatcattgtttgcatacgtggatatagctggttgacgaaatgccggtcaccgctatacatataataatcatatacgcttaagaaccagtagaaagtgtaatccataatggtgttactatggctggtcaccggatcttttccacgaagtaaccagatggtacgcttcacggactcactgtcaaagaacagataataattcatcagataactttggatggcatcgccactccatacccaacggtcgcgcttgataccgtctataaaaaactcgcgtgtagtaagatgcatcgtgtatgctcccacctcccagatacagttcagttcctcgtcgttacaacggaagttaccacgatattcttcgggaagatattcatattgcatagatacttcaccaatctgtacttccggttcgtgagtgatgtatacatagcggaatgctttgctgttctccagcgtatattcattatcagaatgatgcaaaggagatgtgctgcggatagcgagatcagtgatctgtcccggctccagcaggagtttatccaatgtttcgcaatatgctttgtctttcgcttcttccggactttcaccataatagaggtcaatctttcccttgcccgaaaggttctttaatgtgataaatccgaaagtttcttttccaaaatcatacagtatgcctccttccggttgttctgttttagcgacaggttgctgaggttcacgcatcaggctgaattgggaaggacgttgagtggcaccgtcaaagttccagcatccggcatccatatagatggtggcagatgtgtcactagccttaccgctttcatcgatccattccttatcttcataagttacccgccaggacgaatcagagtttaccgtctttcctttcacatagatagtgggaggcgttgcctgattccatactttaatatttaggctatgttttcctgccggaagcagcaaggtttcaggcattccgaactgaagtttcccgtccagcttcacattatatgttccctcggcagcaataaacacttcttctggttcggaaagattcaatactttgctgaactctacgactacataatgactgtctgttttccaaaaaggaggaaaaaaagcaccacgttccgtacgtcggttgttcatctggttgcccaaccagatttcatagtcccccggataccatatccaagtttgggcaaaggtgctgcttgccaatgacaaggcacccaaaagtatcatgcatttctttttcatttttcttatttcttcaagtccctatattcggcttccaaccctgcacgttcacgaatgactgtatctacctgcggaccattgttctcccatacatttccgggaccgttcgcattttgcagatacttctccccttccgtccagttatcgcgtacagtgataaaagaagagccttcgtccgtatagagataaaaccaatgattgggatcgtgtacataacctggcttataaatgctatgtacgcaattctcagttacataacttttcggctgcgagcccagtgtataaactccggctacgtcatacatatgctttgcatagtgatgaatcagattcgcgtgcactctgttgttacgcatacagttcactgtctgcgtccagccccagccaaggctgatgccgctataaggaacttcgcagatttcattgtgttctatattaatatctttcacatagcccgcaaggattgcaagacatccccaatcttcattacccacttcggtaaagtagcaattactgatttgttgatgcgcgcatacttcccgaaggtcggtagggtcataaggtaaatgtgtttcatgggcagccggagagaaactgccgaccaccagtccgttccccgcaatatcacggaaaagacagccacgaacgacaccgccctgcacggcttcttcataatccagcccggttgagcctaaatgatcgaaccgacagcgctcaaagtcgatctgattggcagcagccacgcttacagccgcggcaggacgtcccagccatccttgattatccaagggatgattcagatagtcccgttccattttcgggtcaatacgataaccgtctgtcagatacattcccgcctgaagaggaacatggcctttctcagacggacgcatccaagtcgtatgagagaacgtgattttctcaaaacggatatgtgaaacaggacggtcgaacgtcccttttacttgtatcaatgtctctatggcaggcactatcacttccgtgccggcatcctgcaacttctctccttcccgaggataataatagactttacgggcatctatgtcgtgataccattctcccgctacatccagtagttcacgggcattcgtcagataaaaagcagaattatgcccatctgtcgttaccatcggacgtggccagggatgctcaaactgaatccggctctccggctgatgaaaacgtattgcggcactgtctccagccagttcgacagaacgaatacgaagattggccacacaccacatctgatgcaataccatctctgcatatttggccttcaaagccccttttccgtctaccagtctgcgtatggcaaccgcaggaacataaagaatctcattcttctcgtccacactgcaaatgcggttcatcttctcaaaatcctctacgtcacgggcacggacagctttcttaccattcacccataactgacggaaatccagtggccgcccgttgaacatgggcacatccgctacccagagttttccctgcttcttccatccaccgatccggatgccgccactcaataccactttttcatcagctaccgggcggatcaccgtgggagaatcctccgtcccgctgtcttccggacgaataaacaccggttcatagagtgcatacgtaccgccttccatacagatcgtaattcctccccgcacccgttcatcatctgtccggcgccattcgcgtgcctgacgcaaagcagaagtcaacgtcgctttcggagatggacgtgtaccgtcattgagatcattcccctgcggcgaaatccagatttcacctgctgacagcagatgtgcacccagcaggcatatagttgttaccaataactttttcatttttcttttttacaatgggttatcttgctagcggcatccagactgtcatctctcctttacctctgtttccccatgcataataaggaatcagacgaatatccacagttttctctgcttggacaaccggacgataaagcacgccttcccaagactcagacgatgccagacgcgctttcccttccagggctactatcgaactgccttcaatcgtcgttttcttcggaatcagctttatgtcggcaggaatcaagatgttatcgatcttttctccatttgcaatgtccatactctccaagcagtaaaccaacggaccacgtttcactaccacctgattacggatttcttctgccaacggatgagcttcgagcagacaaacaggcatatccatgaccagttctaccacatctcctttcttccatgtacggttcacttccgcataggtatttgccttggcattcatggataccggttgaccgttcactgtcaacgcagctttcccgcaccattccggaatacggaagaagagggagaaagcacctgctttacggggcactttgttcaacgttacacgtacattgccttcccaaggatagtccgtttcctgcaccaaagcaagttcccccttgtccttccagtttgtagtcaatgtatttgcaccgtacaggttgcaataaatcccttccggactcaatgtataagcataattctgcgcctgacaaagcgtacgcaatgtattgggcggacaacagaaacaactgatatattccgtccgttctttcggccaacggagtgtataaggcagatcggcactgatacgaagaggattcgtatagaaatacttctttccatccagacttatgccactcaatacactattataaaggcaagtctccacaagctccgcatacttggcatctcccgtcacttccagcatacgccagttgaacagcatattacctatgttggcacaggtttcattatgtgccgtactgttcggtaactgatacggacgaccatagctctgatgcactttctgaatgctatccggttcatagcacgttccatccggtgaggtgccgtcatacaaagcaccgcaagctccggtcacgtacatctttcgggtgacaatatcgttccagatactagtcaggttcttcatcagttgttgttcacccgtctccgcatacacatctgccacacctgcatacaggtaattggcacgtacggcatgtcccattgcacgatattggtcacggaaagggatacggtcctgattatcatccgtaccactttctaccataccgcgaatgtcaatcaggttttttgaaagttccagataacggggatttcctgtagcacgatacatctccaccactcccatatagtgtgaagggcaaatagcattgcgtgccaactcggcagaagccgtctcatagaagtgacaaaggaaatctgtagctttcacggcagcatcaaaaagagtcgtttttccggtagcacggtggtgaacgatacctgccatcatcaggtgtcccaagttatacgtttcaaaattcaaccgattggcaaatgcacctttttcgtcctcggagcctactttcgtaccaatcactgtctgttgttgggaatcagccagcgtatggctgtctattcccttattcagttcttctataacaaccggcgtatgtatataaccatctgcacgttgggcttttacgacacaagcaataaagttgtccattaacttgtccaattccggatctttattgacagcatacacagaagcgactccttccatccacttgtacatatctccatcatggaacggaggcccccaatgttctcccttgcatacaccggcagcaatctcaaaattacggaaaccatgagaaacttccggcgtgttccatgtattccacatactctgcaaggaagttccgctaaatacattaaaacgctctccccagaatccattcgtccagtgtacggcatcaattccggtatttgccatctttgcataacggctctgactcatatccgtcagcccattgctctgcgcaaatgctcccgtgacggaggcggaagctaaaagaaataacagctttatctgtttcatttaatatggataattttaaaatttacacactatctctttaaggagagacgtgattatccatattttgtactcaataaagggatgtgaaagctgtccgacagcctttgcattcccttattcctgtttgttctttcgttatttttcgggagtataattcagttccgctttcctcgcctgtgagtgctggaactgtcgggcgactttatactcatgtccgtctttcaacagataacttcctgtctgcttgaaccagaaaccgacatgagcttccacacattgacggcgaatgtccaacacccagtcataattgcaaacgcgggcttccttaccggactctcctcctgccactacctgctctacccatccttccaattctcctctgaaatcaatctgactaagaaggggttcacagataataattttatgtttaataggactttctttataaataggtaagcgataatcgactctgtcctgattctccattgtacaacaaattgtcacattgtcgtatccatctccccaatccggtggcaggcactgttgcagtctgtctatccgcttcgtaataaacataaaatgaaggtcctgccgtatccgcatcatttcccatgcttcggcacgccattcatccacatcttcaatcagaaaatcagaggtaaaacaggtatataccagatttcccgagggtatcttatattctccattctttttcttctgcaaaggcaaaccgaacttttccgtctttgtcaccaccgaactgtcttttccgtatttgccatccgtacgatatacatagcagtggcggcagccttcactccatttgtgacagccgtgccataagttccacattgatgctttcccgcccattttctttttttcttcaaatgtatgctttatctgtttcataggcaaattttcattcaatatccgatagtcagggtagatagatataaatagtgcatcttctttctcgcttgaaaaaagatgcaccaaacacaaacaaaacaaacaatagagctaccttcacaggcggccggtccgaaaggaccaatacttttgatagtgaaatctcacttcacaaatatccgcatatttggggactagccaaactccatccatgtcggatacaaacaataaatgtttcgaaggtgactaatactatgacacaaaggatgaaatgttgcggaatataaaaaacaagaccagacaagaagattcttttgtactatttgtataatcaggaaaaaataaatttcatttattaaaaaacgattaaatcacgtcggtaagcatcattcatccctttactccggcggattatgtcaattaaaacggagatatgccaagcatatctccgcacatctgattatctaataggattcactttaatattaattgttatctggttaaagcaaccatcgtccaatattccttttctccgcactgaactccactcctactttcacgacttcacgtccggctgtctgataaggaatcagatagcctttttcatcaatctgctgcaaatcctgctcggcagtcccattcagtttgaattcgaatacatatatatttaggcgtttttactactgcgtccgtgccatcaaatcttacgataaacttcctcaaacggtaccctgcaccgttctccccaaattcctttatttccattccggattccacaagaaactaccatatttatttcagcaccatgaggcaacttaagcaaccttttgagccgtcggctatccaagccttccaagggacaggtatcatatccttcgttcgccatagcaatcataaatgtttgagcagcaagcgcacaggatttatgtactaccacacgcacatcaccttcagatacttcgagcatcatagggcggaaaatgctgataacattagcaagtagtactctgaaaagtcctaagataccgcagaaacgggcataaacaaacggcatcaatatcccatagtacagttttctgtctttaatacgtttctcctgcctgtctataggactattccgccgtatatttcctgtctcgaaatcaagaacgaatttcgcccgcttccgatacaagtcacgacgtgtgacgaaaacaacaatctgcgaagctgtggaagttgctttttgatcaagacaagctcttgatacctttgccatcaattcaggctgtgtgatgtgataaaactcccatagttgcatatcagaactattgggagccaaagttgccaattccaggcaatgctttactttttctatatctatttccttttctttatcatatacccgtacagagcgacgataatttaaaacttcatctaaattcatatactacttgacttaattgaataatatttcataatgtgcaatatcagaaaatacagataagcccatataaataaaacagatctgcaagttaattgtatcttggctaactatatttttaacatattgtcattgcatatacttcgatagagatctatgaatgtctaaataaaagcgggcaaatatgtgataaataacatatttgcccgctttctataaaaaataagattcgtatcttacttaccggtaatcgaatttttcttcccctgcttatttacaactgaagggcttcctttatatttaatatcaccactaccactaactctcgcatccaactgtctggaagcgtagcatactatatcacccgaacctgcaactgtagcaacgacattagttgcagccagtttttcagcactaatatctccggaaccatttactgtcagtgtcgccttctgtgcagaacctttaatattgatatcaccggaaccattaacttctgacatcacagtagtcgctttcacatttttcaaatcaatgtccccgcttcctttcaccaaagcaaatatattagtatattgcagattctccgcttcgatatctccggaaccggctatattcaaattcaggtcattccctttgattgcacctttcagatatacatctgccgaacctttaatatttacctgattcaatgaaggggaagaggctatcactttcaaacgacgctctccactaagaatcttgacaccctttttgatattcacctgcaatactccatttactgtagaaacttccagcaagtctaccaaattatccgaaccgtatatagaaactgtcgttttagaaccattactctgacgatactcaacatcaggactgcctaatacgctgattgagctgaagttgcttacgttattcagttcttttgtgatatatttcttactgggagtaacggtctgcgcctgtattcctgtgaccaacagaaacattagcactaccaacatagatgtaacctttgaatttctcataatttcttttcattaaatattttaatgacaaatataggaagtatatttcgaattacaagaaaagaattacaattttgccaaccattctccaagttcctgaagccactcctgcttatacacaaaactatcattataaccgaatccatgtcctcccgcaggatagatgtgcagagaaatggggatatctgctttctgtagtctggcagcatacataataccattcagagggcttaccacagcatcatctgcagctgctacaatgaaagcggcaggtgtgccggaagtaatatgctcaatcggtgaatactgctccatcttatccggtgaataggaatgaccaaacattcgttcacgacaaggaaaatgtgtcaaacgatcatcgacactgactaccggatacatcaatatctgaaaatccggcttctcatcatcaggcaaaagcgtagctgaaaaagttgccagatatcctccgatagaagcccccatcactcccagtttatcacaaaactccggaaacttttctcgcacaaccttcaatgccaaccgggtatcttgttcgggaacatcaggattaccatgaggcattctatatttaaagacgatatatgtaattcccagcttcgtaaaccattcggcaaaatcaataccttcattctccagattagtcttcagaaatccacctccgggacacataataacactgcttccattgggcctgtcacaagtaaaaacaaataaagttccttcggaagcattttctacgattccaatcagttcggcattgtccactttcgacaaatcataggtcgtcatggataagtcctcatacaagctaatacaaattaatttcttcatatcgattaatgtttaagtttcttccctattttatgaacaacagaaggaccggaataaataaatgccgaataaatctgtaccatatcggccccttgggaaatcatatcggctgcatcctctgctgtcattattcctcctgccccgataatcagaaagtggcggtcggtgtgctcggacagataatgcactaccttctgcgatttctttccgataccccgaccactgacgccaccgttaccgatcttttccaactgttttgtttttgtctgatgcaattctgagcggtccatcgtcggacccgtggctataaagccttctatggaatatttatatgcaagggaaatgaccagatccaattccttctcatcaatatccgccgggagcttaatgaaaatactgcaccgtttgttcactgcctcacggaatgttgtgaagttttctaaaactttagcaaatgattctttatctatactaccccagttcaacgtaaaataatctacactttcatataaacgagtgaaaaccagctcaaaatctttgatgatctgctcaccgacagaaagcggattcttattgatatttactccgagtatgtaagaatgttttctgtgtcttctgatatgcgccagagctacatcgacaccgcaattattgaaccctgtacgtgagatcagtgattcgtcttctaccagcctgaagatacgggaagaaggatttcccggttgataatcaggagttacagtccccacttccagaaatccgaaaccaaaatctgccaactcatcaaatgtttccgcatttttatcgaatccggcagacaagcctatccggtttttgaatcgcagacttccgtatgaaaaaggttcgtccacttgatagtgtcctcttacgcatgcacgaaccggaagcagatagcgatagattcttaaccagttcaagagcatccgatgtactttttcaggatcaatgagaaataataacggtctaacgattaaattatacattttcaattatctgttttttagattaaagatatgaatccacactcaggaaataacttcttcctagtgctcttacgtatgcaaagtaagacctttttgagcagatattgaagttcattttttttatacccgataacttttgattatccctgcttcttattgcctgtatattgggtacaaaattcctttttaatcgtcctcctataaaagtataaaagcgattagatgaaaatgaataaaaagagattaatcggatatctgtttgtaatggtctctgcaggatgtattcatgcgcaggagaaaaaagtatctgcacaggaatataagctatggtatgaccgtcccgcacaggtatggaccgaagctttacccttgggaaacgggcgtctgggggcaatggtatatggaacgccgggaacagaacaaatacaactaaacgaagaaaccatttgggcaggacgccccaacaacaacgcaaacccgaacgcactggagtatattccgaaggtacgtgaacttgtttttgccggaaaatatctggaagcacaaacgctcgctacggagaaagtgatggcaaaaacaaattcgggaatgccttatcagagtttcggcgacctgagaattgctttccccggacatacccgctattccgattattatcgggacctgagtctggactcggcacgtgccatcgtccgttatgaagtagacggagtgcaatatcaacgtgaaacgatcacctcatttaccgatcaggtagttatggtacgactgaccgccaaccgtccgggacaaattaccttcaacgcacagctcacctcccctcatcaggatgtaatgattcactctgaagaagggaactgtgtgaccctttcaggggtgtcttccttgcatgaaggactgaagggaaaagtagaatttcagggaaggctgaccgcccgcaaccaaggaggaaaaatagcttgtaccgatggcgtcctctctgtagaaggagctgacgaagccacaatctatgtgtctatagccactaacttcaataattatctggacatcacaggcaatcagacagaacgtgcaaagagctatttgtccgaagcgctggttcgtccattcgcagaagccaaaaagaatcacgtagaattttatcgtcgatatctgaccagagtatctctggatttaggggaagaccaatataaaaatgtgacaaccgacaaacgtgtagagaattttaaggacacacatgatgcgcatctggttgccacttacttccagttcggccgttatctgttaatctgctcgtcacaaccgggcgggcaacccgctaacttgcagggtatctggaatgataaacttttcccttcctgggatagcaaatatacctgtaatatcaatctggaaatgaattactggccatcggaagtgactaatttaagtgacttgaacgaaccacttttccggctgataaaagaagtgagcgaaagcggaaaggaaacggcaaaaatcatgtatggagccaacggatgggtattgcatcataacacggatatatggcgtatcacaggagcactggacaaagccccttcgggtatgtggccgagcggcggtgcatggttatgccgtcatctatgggaacgatatctgtacaccggagacacagagttcctgcgttccgtttatccgatattgaaagaatccggactgttctttgacgagattatggtgaaagaacctgtacacaactggttggtagtctgcccaagcaactcacccgaaaatgtacattccggcagcgacggcaaggcaactacagccgccggatgcacgatggacaatcagttgatattcgacctttggacagctattatttcagcttcccgaattttggatacggacaaagaatttgccgctcatctggaacaacgcctcaaagaaatggctcctatgcaagtaggacattggggacaattgcaggaatggatgttcgactgggatgatccgaacgatgtacaccgccatgtatcccatctatatggattattccccagcaaccagatttctccttaccgcactccggaactatttgacgctgcacgcacttctctgattcaccgtggagatccgtccaccggatggagcatgggatggaaggtttgcctgtgggcacgcctccttgatggtgaccatgcctacaaactgataaccgaccaattgactctggtacgtaacgaaaagaaaaaaggaggtacctaccctaacctgttcgatgctcacccgcctttccagatcgacggaaacttcggttgtgctgcaggtatagtcgaaatgctgatgcaaagttacgatggctttatttacctgcttccggcacttccgactctctggaaggacggttctgtcacaggtatcatcgcccgtggaggtttcgaacttgatttaaactggaagaatggaaaagtaaatcgcctggtcgtgaaatctcataaaggtggtaactgccgtctgcgttcactcaacccgctgaacggaaagggcttgaaacgtgccaaaggagagaacccgaaccctctctatgcagtccccacgattccccagccattggtgaatgaaaaagccagcctaaataaagtggaaattgcaaagacttacttgtatgacctgcctaccaaagcagggcaagaatatatattgattggaaaataataactctacctatatgaacagaaacttgttaaaactgattgttgcttgcggagctgcttgcttcatcgcctgcacagcacctcaaaaagcagaaacagaaaaatggagcgaacgtatggcacgctctgagatgaaacgttttcccgaaccctggatgattgaaaaagcaaaagtaccccgttggggatatacccacggacttgttgtaaagtctatgctggaagaatggaaacataccggagacagcacttactatgaatatgccaaaatctacgcagacagtctgatcgatacggacggccatatcaaaacgatgaaatatctttcattcaacattgataacgtcaatggcggcaagattctttttgatctttatgcacaatcaggagatgaacgctataaaatagctatggataccctacgtaaacagatggcagaacaaccccgcacaagtgaaggaggattctggcataagctaagatatccccatcagatgtggctggatggcatcttcatggcttctccttacttggtacagtacggcagtactttccaggaaccggcactatacgatgaagctgtgaaacagattcttctgatagcacgcaaaacttacgaccccaccacaggactttactatcacggatgggatgaaagccgcgaacagaaatgggcaaatcccgaaaccggttgttctcctaatttctggagccgcagtatcggatggtatggagcagccttggtagacgtactggattatctccctcaggaaacgaccggacgagacagcgtaatgcagattcttcagggattggcaaaaactttaatgaaatatcaggaccctcagtccggcacctggtatcaggtaacagatcagggagcgcgtgaaggaaattacctggaatcttcggcaaccgccttatttatctatacacttgccaaagctgtcaataagggatatatcagcaaggattacatcgaacctacccgcaaagcttttgatggaatggtcaagacatttacccgtcttgaagaagacggtagctataccattacgaattgttgtgcggtagccggactgggcggagactccaaaagataccgtgacggttcattcgaatattatatcagcgaaccggttatagagaatgacccgaaatcagtaggatcgtttattctggcggccatcgaatatgagaaaatgacagacaaataaatgtaaagatatgaactccaaaaacgataaagtacaatgagaaaatttaagattcttcctctcttattgctgctgttgacattggcaacttctgccgcagcacaaaagaaaacacaaaagacgtatatcccatggagcaacggcaaactcgtcgtttctgaagaaggacgttatctgaaacacgaaaacggcactcctttcttctggctgggagaaaccggctggctgctgcctgagcgtctgaatcgtgacgaagccgaatattatttggaacaatgcaaacgccgcggatataacgtgattcaggttcagacattgaataatgtcccgtctatgaatatctacggacagtattccatgactgacggctacaacttcaagaatatcaatcagaaaggcgtatatggttattgggatcacatggattacattatccgtaccgcagcaaagaaaggtctttatatcggcatggtctgcatctggggaagtccggtaagtcatggcgaaatgaatgtagatcaggcaaaagcatacggcaagttcctggcagaacgctataaagacgaacctaacattatctggtttatcggtggggatatccgtggtgatgtgaagactgccgaatgggaagcattggcaacctccatcaaagcaatcgacaagaaccatctgatgacattccacccgcgtggcagaacgacttctgctacttggttcaacaatgcaccgtggctggatttcaatatgttccagagcggacaccgccgttatggacaacgtttcggtgacggagattatcccatcgaagaaaatacggaagaagataactggcgttttgtagaacgcagtatggctatgaaaccgatgaagcccgttatagacggtgaacccatctacgaagagataccgcacggtctgcatgatgagaacgaattactttggaaagattatgatgtacgccggtacgcttactggtctgtatttgccggttctttcggacatacgtatggtcataactccatcatgcagtttatcaaaccgggtgtaggcggtgcttatggtgctaaaaagccttggtatgatgctctgaatgatcccggatacaatcaaatgaaatatctgaagaatctgatgctgaccttcccattcttcgaacgagtaccggatcagtctgtcatcgccggacagaatggcgaacgttatgaccgtgccatcgcaacacgcggcaatgactatctgatggtatataactacaccggacgcccgatggaagttgatttcagcaaaatcagcggtgccaagaagaacgcatggtggtacacaaccaaggatggtaaactggaatatatcggtgaatttgacaacggtgtgcacaaattccagcacgacagcggctacagcagcggaaacgatcatgtcttgattgtagtagacagtagtaaggattatgtgaagaaagactgctatcaaattgacactcatgaataaaaagatacttatattatcattcttatctgttctgtttcttgcagcaggtccgatacgtgcagccatagacgtaaccaacctgcggacagagcagctaaagaatccgtcgggtatcgatacgcgccaaccccgtctgggttggcgtatcgaatcggacgaacagaatgtgatgcaaaccgcgtatcacattcttgttgcatcttcccccgagctattggcacaagggaaaggagatatgtgggattccggaaaagtagaaacagatgcttcccaatggataacctaccagggagaaactttgaaacgcaatgctccctacttctggaaggtgaaggtttacaccaataaaggtgaaagtgattggagtagtccggctttctggagcatgggactattcaatgaagcagactggcaaggtcagtggatcggtctggaccgtgcagctccgggggacagtgaaactcaatggagccgcctggcagcccgttatcttcgcaaggaatttgccttgaagaaagaaataaagcgtgccacagtgcacattgccggaatgggattgtatgaactgttcatcaacggacaacgcataggtgatcaggtactggcccccgctcctaccgattaccggaagacaatcttgtataacacatatgatgtcacttcccaacttcagcaagagaacgccatcggtgttactttaggtaatggtcgtttttataccatgcgtcagaattacaagccatacaagattccgaccttcggatatcccaaactgcgcctgaatctgatcgttgaatatgctgatggcagtaaggagacaatcgcgacgaatacttcatggaaactgacaaccgaaggtcctgtccgcagcaataacgaatatgacggcgaagaatatgacgcccgcaaagaactgggaaactggacgcagacagattatgacgatacaaaatggatgccggcagaacgcgtcagtattccttcgggtacacttcgtgcccaaatgatgccggggatgaaagtaacggaaacgctgaaacctgtttctatccaaaaaatgggtgacaaatacattatggataccggtcagaatctggcaggatgggtacgtttccgcatcaaaggtcaggcaggcgacagcattcgtcttcattttgcagaacgtctggaatcagatggagaaatcttcacgaaaaatctgcgcgacgcacattgtacggatatatatgtagttagcggacgtgaaccgcaaggtgccacctgggctccccgttttgtgtatcatggtttccgttatgtggaaatcagcggatatccggatgccaaaaccgaggatttcgtagtggaagtcgtagaagatgagatggatcatacaggctctttttcctgttcggacaaaacattgaaccaagttgtacgtaatgcattctgggggattcggagtaactataaaggtatgccggtagactgtccccagcgtaacgaacgtcagccctggctgggagatcatgcaatgggctcttggggagaaagtatgttcttcgacaatcatgccatgtacaacaaatgggcacgtgatatccgcgaagcacagcgcgaagacggctgtattcctgatgtagctccggcttactggaactattattcggataatgtcacatggcctgctaccctgcccttagtctgcgatatgctcttcactaattatggagacatacgtccgatagaagataattatccggctatcaagaaatggatatcgcacatccgtgagtattatatgacaaaggactacatcatcaccaaagataaatatggagactggtgtgttccacccgaatcgttggaaatgattcacagtcaagatcctgcccgcaaaacggatggtgccttgatcgctaccgcctattacctgaaagtgttgcaactgatgcatcgcttcgccagtcttcagggattgactgcggatgcaaaagagtgggaagacctggaacataaaatgaaggatgcattcaatgcacatttcctgcatataaaggaaggtacttcacttgtacccggtcatactctgtatccggatagtgttttctacgggaataatactgtaacagctaatattctgccacttgccttcggtctcgtgcccaaagcgcatatcaaagaagtagcaaagaatgcagtaaccaccattattacaacgaacaaagggcatatcagtaccggagtaatcggtacgcaatggctgatgcgtgaattgagtcgtcgggggcatgcagatgtagcttatctgttggtcaccaatgatacatatccttcatggggatatatggcagcacaaggtgccaccactatttgggaactttggaacggtgacacggcaaatcccggaatgaacagcggaaatcatgttatgttattaggagacttacttccctggtgtttcaacaatctggcaggtatccgtgccgaccgttggaaatccggttacaaacatattgttttccagcctgctttcgaaattcaggaattgagtaatgtggatgcttcttatatgagtatctacggaaagattaccagccgatggaaaaagactcctatgcatttggaatgggatatcgaacttcctgccaatactacaggagaagtacatctgccggatggacgaaaagaaaaaataggttccggcaaatatcatttcagcgtagatataccgacacggaatgctgccatcatcagcgatgaatttctatacgagaaagcttctttcccggaatgtcacggggcgaccattgtagaactgaaaaacggtgacctcgttgcttctttcttcggtggaaccaaagaacgtaatccggattgctgcatctgggtttgccgcaagcccaaaggtgccaaagaatggacggctcccaagctggctgccgacggagttttttcactcaaagattcgcaggctgctttagccggcatagattcgacctgcactcctgtagtggatgccaaaggaaaactgactgcccgccggaaagcttgctggaatcctgtacttttccagataccgggaggagatttaattctgttctacaaaataggactaaatgtaggcgactggaccggctggctggttcgttcaaaagacggtgggaaaacttggggcaaacgcgaagtcttgccggaaggatttctcggtcctatcaagaacaaaccggaatacatcaacggtcgcatcatctgcccgtcaagcagagagggcaaagggggatggcgtattcattttgaatattcggatgataaaggcaaaacctggaaaacgacagagtcggtacctgccgaactgtctgtcccgactcagaaccgtaaaaaaggtggtattaacgtagatgatcaggaagcgggagaagctattcagggagaaggggcacaaccgattcttgccatccaacccagtatcctaaagcataaggatggaagattgcaggtactttgccgtacacgcaatgcaaagattgcaacatcatggagcagtgacaatggtgaaacatggagtaaagtgacattaagcaatgttccgaacaacaattccggaacagatgccgtgacaatgagtgacggacgtcacattctcatttacaatcatttctccacattgtcaggtacaccaaaaggtccccgtactcctctctgcgtagccatatcagaagatggaatcaactggaaacctattctcacattagaagacagccctatcagccaatattcttatccaagcattattcaaggaaaagatggaaagttacatgcaatctatacctggcgtcgccaacggatcaagtatacggagatagatctctcaaagattaagtagtagctgaataaaagaaaaacagattctctgttatcattataccgcactgacaatgatcgtatcagtgcggtattttgttgtttacaggtttatcaatactcctaattgctgtataaattgcatagaccacataaatatattatttttgttcctcagatttaaaagtaaaacaatcatggcagataattatatagaaagacaacaagagcaatacgaggccagaaaagcagcttggaaacaggcacagaaatatgggaaaaagaaaacgactaccagcagtcaagtcaaaacggaggtagcaggtgaaatagtttcaaaaccggacagcctgaaaaaaagagtattcgtgacaggcggagcggaaggcatagggagagcaatagtagaagcattctgtaaagacggacatcaagtagccttctgtgacattaatgctgtgtccggtcaacaaacggcaagagataccggagccatatttcatcctgttgacgttagtgataaagaagcacttgaaagctgtatgcaacagatattggatgaatggaaggacattgacatcctcatcaacaatgtcggtatcagcaaattttcttccattacagaaacaagtgtcgaagatttcgacaagattctttctgtcaatcttcgtcctgtatttattacttcacggttatttgccattcatcgtaagggacagtctgattctaatccttatggaagaatcattaatatctgctcaacacgttatttgatgagtgaaccgggaagtgaaggttatgcagcttccaaaggtggtatctattctctgactcatgcattagctttatcattatccgaatggaatatcacagtaaactccattgctccaggatggatacaaacacaagattatgatcaactccgaccggaagaccattctcagcacccttcccgacgagtgggcaaaccggaagatattgcccgtatgtgtttatttctctgccgggatgagaatgattttatcaatggtgagaatataaccattgacggaggtatgacgaaaaagatgatttatacggaataaagttctgtattcaacgcatcccgtgtaatctctattcccgtctccacaatagaagctgcatgatggaactccagcatatcataagcattgccggacatctgaattaagatatccggctgacaacgttctatttgataacgggtaatttgctgcatcatcattcttgaagattctgtcaacaagttataaggactcattttctttttcttaccgcaatcaatcggagcattgacatcgactgctatcagaatatctccttccgtacgatgcacctgattcagcggaaggggattcagtattcctccgtcaatcagaaccataccatctttccgtaaaggccggaagagcatcggtatagaaatagtagcacggatagcatcatacaaattaccactatcgaacctcacttcctgatcgcaaacaatatcagtagccattgctacgtacggtataggcaattcttcaatattcataacgggaataatctgcttcagttctttgataaaacgatcccccttcaccaagccgtcccgacttaatgtcagatccgccagttcccacatcttacgtttatcccagctatagagccattctttacattcctccagctttcccgaagcatacattgcgcctaccatcgctcccatcgagcttccggcaatagaagttatctcgaaattatgacgtaacaattcttcaataactccaatatgcgcaataccacgtgcgccacccatagaaaggactaatgctactttttgcttatccatataatatacgtttttattagctgtccacaatataacacattttccgcaataaaagatgtccgaccagctctattattctagaagcaaatgaagcaaaaagcagcaatcctctctatgtcagagatattgctgcttatagtatgcattaataaaaagtatctttgaggctctatttcctttcctttgctttttccgcctttcgcttttctgcatagtctttatacatttggcgccagttacggccatgctcatagaaatacagttcgatcttcgttttataagctttaaagatagcagatatctgtttcatgcttttgtaatcaacagcttgttcgcgagccagtttcagctgttcaagtataaaggctgtttcttcctccgtcatatcaggaacaatctcctgataccctttcatggtaaatgctaccttgccaactgtatatttatctaaaatctgctcaacttgttcttccgtcagtactctgcgcaaccctttcatcagtctttcatgaacctccttgggcatagctgagtctgctattatctcacgttcgagctgagttaacggtttgcccgttgtaggattgatacccgcaggtattgtcgtatatggatgatcattatgccagtctcgaacctggcgaagatgattataaatagtcgtcaccgcaaaacctgatttcttttcatcatccagattgagtgaagctacccattccattgctttcttttcaagagaagcatccgatttcaatttggcaaaagccttcttatcaaaataagcagccactttgtcgaacgaacgaattgcattttccggtagtaactcccctttctctccaaaactgtacatggcagactccggttcgatagttactttactctcatccaacatctttttatctaaatcgaagacttcggcaaagaaatcatagactgcatttcttttattcggaccgaaatcatgtttttctttgggaagatgaacgttcgtcacgttgtctttcgcatcatagaatccatagatacgctgcaaatacggaaattcaagtgcaggaacacttgctgtccagtccccgccatcagaaaccactaattgcggacggggagcgaatgttgcagccagttcggcattacaagtacctcctgccgatagctgaataggcataccgctttcacaaggacaaccaccatcgaaatgagaagccagactaaccaccggggcagaagcagtaaaacggtcatccaacgttgtcagtagtacagtatgcgttccaccaccggaaccaccgttggcaccaatacgcttggtatcgatatctttacgggaagcaagcatataatcgagaatcaacaatccattcattgcctgaatagtatgtgccgcactactgcgatgcgccgcacttcccacctggagaattgattctccccagccaaacaaatcataatcgacacaaacagctcccatacgagctaatgtgcccatacgctgctgctgatcttcccgataacgaccgccaccaaaatgtccgttcggacaaataatcagagcgtgtttccctttcgattgaggcgtataaacagacccgcaaacatacagtcccggaagtgtttcaagtgcaaaattctgcacagtatagccatcaaacttccgtattttcgatagaatgggggttgagtttacacattgggccaataaagtatcgatccccaaacgttgacggacctcttttctcagtgaatcggcacgaagttcaaaagcctgcttatccgcataaagcgtattgagataagccagcattttttctccgtcagcatctgtacgacgaggatattcataagccttcaacttatatagattaccgctctgtctgacaaatttataatcgaatggtgacaacacattcgtcaaagattcttctacagaataagggcggatacggaaatcagcataaggtaaaatctttcctaccgtatcaatatcatatttcagacggactccgaaacgattttgaatatctgtcaatacttcattcaagggacgggcaaattccgtctcgtatgtctgcgtctgtgcttctgccgaaagagatgcagcgagaagcaatgagaaaaggattcgtttcattttcttatatttataaatatgtaaccttccaagaggtttatttcagttttatttcttcaccgttaatgattacgttatccatagtgatacgttcacaatcttcaaagatacacttctgtctggctccctgaatatggatgtcacgcaatacaatgtcagaaatcggagcttcttccagtcctactattttaatcggagtctttacatccgtcacagtcataccactgatatgaacattacgaaatatcggagtacgctcactctttgcttctgcaggcatttggctgtatttcagattcaagacgacagcctcctgcttgatgttactcattacgatattgctgacacggatatcctctacgactcctccccttccacgggttgacttgatgcggataccacggtcggttccgtcaaatacacagttagagattgtgaccttacgtacactgccactcatttcactgccgatcactacaccaccatgaccggcaagcatcgtacaattggtaatagtaatattctcacacggcactcccaagcggcgggcttgtgcgtctcttccggatttaatcgtaatgcagtcatcgcctacagaaatatggcaatcactgatatgtacattccggcaggattcaggattgattccatccgtgttgggagaagggacattatttattgtgatccctttgatggtcacattatcacaaaactccggattaacagtccagaaaggagaattgacaattttcactccttcaatcttcaccttcttgcaacgaacaggctgaatgaacggagggcggaaaaaacgacgctgcaaagtgctgacataatctttattcgtctctgcatagatggcagtcgtatcattctgagcatcccacatcggctgatatttattaatatcacgcataccattatcttttaggtcaatcattacacgaaagaactccatccaccacttcttaccttgaccatccagtgtaccttctcccttaatagtaatattttccgcatcaaccgcatagattaacggctggaaacttttcatcatgactccttcgtgacgtacttctacaaaaggaagataatcatcaaagttgtctgaaaaaagcagggtagctccggcttccagttccagtgtaatgttacttttcagatggatacttcccgtcagatacgttccggcaggaaaaaagagcgtacctccgcctccacgattcaaacggtcaatcgttgaatttatcagctttgtattgagagctttcccatttgcttttgcacccgctttcaacatatcaacgcgttcggcacgaaggatcgctgttgcgcaaaggcaaagaaaagccaaaagagtgattcgtaaattcatattctatattattaaatagttcttcttttttatatcttattcggcagcaacaaacttatatgtcccgctttgtacttctttcggttctttttcacccggaagataaacgatagcagtggtattcaccggtacagatacattcagagtaaaagtaccgctctgacgagtccagtctaccagaatcgtaccgtaaagagtctcataagttgatttaacgtatttcaagtctcctaccggcttcggagcaatgacaaatttctgataaccttgcattggctcatccttttcatttacagaagctgataatgttgtagacggacgaataccaatcaatgaattaaagaaccattcatcaatctgtcccatcatgaaatgattccatgaagaaccctgacgcgggtcccactgctccgtcaatgtagttgcaccaaacttcaactggaagccatatccgggagcttcttcatgattgaacatcttataaataagctcatgctgtccattacgtgccaatgtctgaatcagatagcggtttcccacatctcccgtggtcaaacgattgccgtgcgattccacatctttaatcagattcgtcaacactttggcagccagacttgcatccggcgtgtaatctcctttatctcctgtactttgaatcatctgaaggaagatgggaagtgcattactagcttgactccctgtaccatattgtgctgtattactatccaggaaccgtttgttaaacgctaccattatatcgtatgccaatgaactgtaataacgaacgtcaaattcattgcctaccattcgggcagcctttatcagatacatgacagtcatataataatgtgccgtagccaccaacggaacaggtgtattacgggagaatccggcgcggaaatctccataatcataccagtcacccaatccgaaagaaagaataccgttatctgcccgagtcttaagatagtcagtgtaacgacgcatatgctgataatacttcttaatcaaagaatcatccccgtaagtttcatagtacataaacgggaaaataaccagtgaacctccccactccggggattcggcaaaagcatccattccgggaccttcaaagactacatactccggagccgttgtgggcattgccccattcggatgctgggcgtctgccatattctgcataatctgtggagcataggctgtcagatcataattatagagcagtcccggtccattaaggtgcacctgttccagccatccgagtttctcccgatgcggacaatcagtaaatacggattgcatattactgcgaaccgccttctcaatcaatcgatgagctgcattgaatattcggttggaagattcgaatgtagagactttctttgccgaattatagataaaacaggattgaatgtttttaaggacaggcagtttctgaggatttttctgccctttcaatacagcaccttctacctgaatgtaccgaaaaccataatatgaaaaacgaggatgccagatttcgtcaccttcacctttcagtgtatattcataataatgctgacgccctgtctgacgctgattacaagctccttcatccgtcaatgcttccgctactatcaaggtgactttctgtcctcgtttaccacgtacggttatctccggaaaaccggccagattctgtcccatatccaacacaactgcagaagggtctactgttcgtttggtagatttggaagcagccatcacctgttctgaattcaacttggttactttctgaatatcataccgttccataatcttcaccggaggtgccatctgcgaacggagcactcctttcggcgcttcctgaaccactaccggacgccaatgactatcattgaaaccaacttgattccatcctttctgttcgcgacgggcatcataatcttcccctccataaatacaattaaaggttatcggactcagatcatatttccactcatgatccgaacggatcgtctcgcgtgttccatcctcataattgattactaattcaaataaaagtgtgggaggaccaaaactaatctgcaatttgcgatagcgccctccctgtacattgtagaatccattccccaataagattcctacaacattctcaccatcctgtaactgctccgttacatcgtatgtattataataaacactcttatcataatcgctccaaagcggagcaaattcactatctcctatttttttgccattcagagaaaactcatagaatcccaggccacaaacatacgcagtagcttccacgattttctttccggatttccgattcgcattcttcccttttgcctctcctgtctgaaacgttcttcgcaagcaaatacttttctttgccaaagtatctaccgcttcccaagcagctttcacctccggtttcttcaattcgccaccatgaaactttcgcccttcgggaaggtgagaatccttacgagtgatggcgccgatccatttccctgaagaaaggtcatcggatgccaaacggaattttgcttcctgactccattcggaaggagtatccgtctcatcccagacacgcacacgccaactataattaaatggattattcagacatatatccgctccttcagtcggaaccagctgactctgtgaagaagtaacctttccactattccagacggaacgtccggtaaaagcctccctaatctctatttcataagcagtctgtctcgtgccattctccggtgattccattgcccatcccaaacggggacagctttcaacgaccaccagcccttcctgcatttcgcaggtaaggcggctgatcgttatattctttgcctgtacgaagcatggcagacaaagtagaagaagaagatatttcttaaaagtcattattgctctgtctcttatctgttataaatatatcactttaatgcattctcgcaaacaagtcttgtcaacgtatctgcatgtcctgcttcttttccattcacaaagatacgcaatccctttccacaatgataacgatcgccattcttatcccaaagaatcgtcagattatgaccatgatataaaacattatccagacagaaccaatcccatttatctgccggaatcagcggattaatctctatcgtatcatccagacgcggacgaagtccgatcaatccggtaatcatcaaatcattgaaagtagaatgattgtaatagcgactacgctcctgatcgcctttcagccaatatccggttacttcgtccagatactcgccaatatatggacgtccacgatgatactgcgactctacatacaattccatctgacggaaatatacgctgtcagacaaaacggtctgaggataattattcatgaaattagccattgcagttaacgtctgtgcagaagcaaacggccagatagccccgtcccattcacatttaccgactccgcgtgtgcggaattccggatgacggcgttctgccgtagtcaatccataaggagcagaaaatcctttctcatccataatttctttccaggcaacttcatatttctttgttgtatccggtaaattgaaataccacggaatatatccgattgcctcgcgcacattggcggaagagtcagtacgcatcgtttcaaagaactgatggcgtgtattccataaatcgttttctacgagactctttaatgtatccgctctcataccatacctcatagccattccttcatcaccggaaaggattcccattatcgaaagggcttttgcattaccatacatatagctgttaatcgtcggacgggcatatttcttatttcggccgccactgatggattcctccatgccatcctgtacatcaccctgccaatacagtccgttcttcaaacggttggtacgttcccaacgctgatattccgtttccagatccttcgtcatatccagcatgaaatctttatcgccatccaccatatagcgtgccagtacagcatctgcattccatgaactgaacttatccatcttcttcatcggtcctccatcattgccacgataccatgtatggataatctgatccagatatttcggatcacgcagccaacgactttcataaatatgatgtccgatagcacaggcaatcaggttatacttatccgaataagaacgctgaaccagaaactcggtcataccatatccgacgggagtctccttgatatgcttacgcaatgaccaccaacgataataatacatttcttcaaaattacgctgcgggcattcaaacaaagggatattttcttccatccattccgaagccttggcattgggaatagcctgaacaatattttcatcttccatgccattgaaagattctgcataatgactaaagtctgcatatttcaaaaaagcggaagaagcgtccttatcggtggacgaagtcttcacattggctatacgatattctgccaatggttcctgtccgcctgcatcgggcaaatcataggtttggtcagcaggagtatccacagtcgggaatgtacgcatttctccggtacggaaaacaatccgttcaatcgttgctaccggagcatagaacatacgcagccctaccctcttaccatccacatacacttgaatattacgatcggcagtcgaaagaacagcttctacatgataagtctttcctgcttcatagttcatcatatttgcaaaacgtgaaccacctttcatacggaaaataccgtccggagtgagttccaatcgtgaacaggcaatgctgttctcatccaggaaatcaatctgaagtatacctttatcattctgtcctgccgacaaatcaaatgagactttcaattctttcgaagccggaatcttacgttctaccttcgcatagtcgaagggatctttatcttgtagcttcaaccattctccttctaaagaaacgggtgcccaaaccggagaataaatattccaattggtcaactcagctattgatcccgactttgaaaaatcatcatccgcgtgtgcagaagcattaatctgtaccggaacaggaatgcgggaaatccacatatcttctttattcacgctatatgaaacccataaatcaccatctgcaggcactccgtttccttcctgaatgccacggggatattgaggaccatatgatttgtaatttcctccatagcgcatcggagtaatttcaccatgtaccaagtttaatgtagtatactccaatccgtccttactcaacgaaatagccaacggccagcggaattccgacggattataaaccgtagcataggttccatcgctcagacgttgtccccagatttttgcattactgttgacaaatccttttgcacgaagcacaggttctgcccaggtatgtcccccatcttcactgatcgaagtcaaagcgtgtttccaaagactcgcaatgcgtccatcgggcaatgtatagcagttgaacgctttatatccttttttcagtggaatgatcggatcttcacggtcagcttcttctacccattgcatcatataaagcggattatccagtatttcctggcaagcctttacgaattcccggtctttgctctttttaaaatagggataatcggtattcttttcgttaaatccatgattgtaataaatgaaataaatcggtccgaacgaaccgtccttctttatctcacgtactacccgaccgataccgtttccgtcgttcggatcatctttcttatccaaagctactccgtaatttcccatcgtaatcaatctgcccgacttagatacataaaagcctacacgctggtgcatgatagcaatcaagtcttttgcctgcatacccggacgggattctttggtatatccgtccggcactttgtaaggaggaaacactatttccggatttgtccattgataaccgtctttcgaggtcatgaggaacgtttgggaaggtggtacatgttcatctgacggatctgccagatactgataataaaactgaccgttccagtaagccagcataggctgatggttgtaagtccatccattgccgttcgacgcttccggatgctcgcggttggcacgcaccagttgaatattatgcactcccactaccggagacaattgtccgtcgtgataggtgggattcgataattcttttcctgtgtaatggattctgtcctgcggagtctgcgcctgaatggtagtcgccatccatccggcagccaatacaagaagaatcttcgttgagttgttcatgatttatttcaggttttagtttattccggattcaacttatctagtttaagtttatttcttcttgctttcttccagcaatgttttaacatctgattctgaagctctaaagatggttccgtgtttatgcccgacaggcacactcacactttctgtgatatccgtgaagttcttaaaatcacgggtacgcatggcaccgtatattttctttttataaacatcaaaatagatcagataatcatcacctaatttctcgacagtcggtccctctacaaacgattcggtaaatggttgtgatgacggcgaataaggtcctgtcagagagtcagaaaaagcaattttcagattacgttcgggacgtgtattatctttgagcaccattacataatcattttttgcccgcttcacaatgacagcgtcaatcgagctgaaaccgggatcatataatactttcgccttggatactgtcttaaaatcctttgtagtgatgtagtataaacgatgattattctcttcttcttcgattcccttttcaaaacgacctggtacacatgaagcccatactaccataaactgttcgctctcgtcatcataaaaaatctccggagcccatacattgacagtggtcggttcgtctgccattacaggaatcatttgttgctccgaccagtgaatcaagtctttggaatttgcataaccaaagcctaaatcccctttccagctggtggtccataccaaatgataagtaccatccggcgtacgcaccatggaagggtcgcgcatcaggcgatgttgtcccaattccggcttcagccaaacaccgggaatactgtcccagtgcattccgtcttcactatacagatatctcaaaccttcatcagccggctcatgaaatgaagtgaacatataataatctttattccctccacaagaagctaaaagcaggatgcttattgcagctaatgtatttcttaactttcccatttctatgattcttttacactatactaatatcctttatacagagacgatgaaaagccggatttgtactcaaatagattggaagattcgtcagaatcaaaatttagagacgataaaaagggcgactctccgagccacccttttcctccatcaaacaaactaaccatttaataatgggaaagaattccacttctttttatagtatctcattggttaccaatcctttttttaccggattctatacttttacagcgttcctccccgtgctttcacacgtttggcccactcttcacgttctttcgtcaaattatatcccctcttggccagataattgttgatacgtcctttgtacttgccgaaagccgcatgtttcttatttgaattttccgcatccatggcaaactcacgcgcttccaccaaccaggcatagatttgtaccttttcttcttctttcaaagaaggaatcatatcaagcgtagcttcataagtcactttcaccacaccataagtcattccatctttcactgcttctatctgttcttcattcaagaagagagacaagctggccggaaaggcaaaatgagaacggtacaaagccgcatctttttcgttttcagcagccttcaatgcttcatttttcgcatcaccggtcaaccccgattctttgactgccttcacctttgcatcccgtatttcataaatatcattcaattcgaaatagcgattggcaatcacattacaaacatcttcagccacttttgcatccgtcagtccgagtttatctacaatcttttgcgaacggttgacgatagactccacatatttcggatcacgattctctttgttcaaatcgactgctccagcagatatccaaccgcaaagaaacaacagagacattaaaactatctttttcatttcatcttattttttataccatatgccaaaaggaaacccagtcccggtatcttataccgataccggttgcagattacattaattttcctttctcagccaatgtatcgtagttattttttaaatctctccagtctactttgtgttttgtactgattccattgatatacttttcaatattcgtatatccatcacctgtacaatctttattagcatcacttggatcattcggattcaatccattagcaatttcccattcatccggcataccgtcaccatcagtatctacatacggagtccctttgtattcggggaaaccacccatctgacgaatatcagtaatgatacctatcttataagaatctttgggtaaacgacgatatttaaactgaccgtcctctcccattgacttaggagacaggcctgtaagatcaccattagcatccttcgcaagtttcttatcataataaggaatacctgtttttacttcttctatgatgcgttcgtccacgatatcacggcagggtatattggcaccgacatgttttgtcacataatcataagcatcattagctgatgtaattttgatataaggcattgcaaacggctcatagctccgcatattctcagtatatccggctgtatttggctgactctcgatttggataccaccattccagttatctttcgtgatttccggatagccttccataacgttaccatcagcatacacgcgaccgtataccttataattcagtttactgcgtccggcttccggtttcagaatacggcagcctaccgtattattctttggagtagcaggaccgggtttataatagttattgatcatattgaacatggcggtataatcgccaccatcagaagaacgatgcacccaattaaatactacattattaacgaagttgaatactccattccagcctacagacggattgcgaccagagttgctggcccaaaggttacgcataaatgcacagttctcacctcccagtgtgctaccgaatgcatgattataggtatccagagcttttgcagaaattgtattctgaatagtcacattgactgtcggaagtttcaagtccttgctttcatattggccttcactcggatcgtacatatgacgatagaaagaaatattttcgtccagtccccatgtacatgaacagtggtctatcatgatattaccaatcggattaccaccgaaagagtcgtcacgatgccatacttttgtttctccacgacggaatctcatatgacgtacaactacgtcgtgtgtatccacccaaaatgattctccggcaatgcagacaccatcacccggtgctgtctgtccggcaatagtaacgtaaggtgctcgaacaataatcggagattccagacgaatgataccagccacattgaatacaataatacgtgcaccacctgtctcacaagcttcgcggaatgaacccggaccacgatcattcagattagtaaccgtaattactttacctccacgaccaccaaaactatacattccacctccttcagcacccggaaacgagggaattctagcttgtggcaaatcatagggacgaccagcccatgagatataaggacgtccttcttttgcttctttcagtactataggtaacgctttctcccatgcttcatcagaacgtttccgttcctcggtcatcatctttgtataattcgctttggcttcgtcagttatctgcgggtattgtgcccatacaacggtcggagtcaacattgcagctgcaaaagctactaaaagtacatgtttcttcttcatttttattaggttttgtgagattgatcattctaaaatacaataataagacgtaaaacaaggaaatatgtaatcagaaaatataatatatttttctattctaactttaaatacaaaaggaccacttattccttaatattcttttcaaaagatcaaagtgataaatggtccttaggtttatttcagaatgaacattcttcagatcaagtaattattttgataaacgaattcactctgccaaaggatcaaaggtaccatcagctccacctctccaatagtcgccccatcctatattttgttctaatgacacattgttttgcatcgcattcttcttaaaacctaagatataataataaggtttaaatgttggaagaatagtttcatcattaccgtcagtactaagatttttacgtttaaaatgttcttgataaaactgagccaatgcctttacctttgcatctgcatatgttatttcatcatcggctgattctgtacaagttatatcttcagtcaaacttaatgctgtcggacgtttattccataattcatcataggtttcttttattgttttatcttcattgtagacattattacttttagcagcaataaaattttttgcataaacctcaatccgatgtcttctctgaccattcaatggttcaactcctaaatagttacatgtattgccattaaaacctgtaagtttccaagtcgatttcagtgcttcttgccccactccaccatcaaataacatccaacgtcgcacatcgtggaaacgtttaccttcataagcaagttctatttgacgttcataaagtatagcctcaaatagtttggcacgatcattaaaaatagctggatctaatccacaattatctgtatatcctacacgcttacgaattcgtttaagagcattcactgcctcgtcaaaatgatttgccccacaagcagcctccgcataattcaataatacttcggcaaaacgtatttccatatatggagcagcagactgtctgaatccattacctgaagtcttttcaaagatatataaaggattagaattgagtgctaaatcatctgtacgcttacgcaaataaatccccgtatttttggtacctagacaatcagctgcatagcctgacttagagttactattacgatcatctacattatcataccaacaataattccacaacttgtaattattccctgtagtatacccattaatgccataaggtaattgacctttttcaccaaaagatttcaagtcatcactatcaaacttccattctacaccagggaacgcaaaagtgcgataaaatcttggatcgcggtttaaaaagaaaagttcttgattataatcataagatccattcatgtcatttggtttcttcccatccgccattggaaaaagatcaaccatttctgcagtgggagtcataccacccccacctccagcattagctgggcgaagagaatgttcccatccattccatttttcaagctgtaagtgctcggctggtgatacattattatataaagttactaatactgcctcagaaacagttcctccaccaccttctgagccaatataatcggagaatatctttccccaacctgctgcattctttcctgaattgttttcataagccaatccaaaattaccttcttccagtttttttacagcagctaagtttgtttgatatgcagtttcccatcgtgtaacatcatccgccctattaaaaagcggactggcatataacaattccacacgaccttttaaagccaatgctgcccccgatgttatgcgtccaaaattcttattttctgactcccaacgtgctggcagataatcagcagctgtttgcaaatctttgcaaataaaatcaatacattcttttgtagacgagcgtggaactaccaaatgaataccttcactatctccaattataggattttgtacattatcaataataggtacaccaccatacatcattaccattaaataataacgccatgcacggaagaaaaatgcttgtcccaacaataactgcttttggcgttcagttaaactttcactgccaatcactccttcgatcatatcattacactcacgaatacgcacccaaggagaataattgttatctagattaaaataatcagtaacagtttcataatctagaggagaattaggattcatcaaacctgatatccctccatattcttctgtacatttcgaatattgatcacttgttcctgtgcttggcatatcacccatagaaccagtcagatcagatccacccgtcgcactcggcagcatgatataatacaagtaagctatacggttatcagctgactcatagttttcataaatagtcgtaccgttaaaacttccatataattttttgtcttccaaaaattgatcactacaacctgtaaagatggcagctgttatggtcagtaatgcaattgaaccatacttatttattttcttcatcattgtattcaaattattaaaatgaaacattaacacctaacgtgaatttacgtaagttcggataatatccatagcttcccgcccaagaagcccatgctccttctggataagggtttaggaagttaaatacattttggcaagtaagattgaaacggcaactactaatgccaattatttttagccattctttaggcaatgcataagctactgtcatattacgaagttgcactgttgctgcacttactttccaaaaagtagagggtgcaccatttacgctactatagcgaatattcgggtattttgcatttctgttttgtgctactgtaactatattattagcatcataaatatcctcatatacaaacatatctttccacattgccgacacattactatattcagagtaactttctttacgcatagttgtaggaactaaggaatatgctccccaacttgcaccaaactgcgcactaatagaaaaatctttataagagaaaccgaaatttaaagttccaccgtaaggattactagcacggtgagaaatttttatataatcttgttcatcaacaataccatctgccggaccaaaagttccagttgattcatcatattgtccacgtacatccttataaatcagcataccaggatgtacattttcttttgtatttcctaaatatttagtaatactatatttatcaaagtactcattaatttcctgataactacggaacatacctatacattcataaccccatagtcctctatcagaacgttcatttctcactaatttatcaaaatcatatgcagccttccaacctgtctctctgattttattatcattgtatcctgttgtaagttttacccaatatgacatgtcttttccaattttatccttccatcctaatgacaattcaacaccatatgtatctacctcaccaaagttttctggagcaggttgtattcctaccgtattcggataataagaagttccttgatgtgaagcaaacatttcacggcccatatcataatagaagtccaaattagcgctcattcgattcttcaaaaaggccatatcaataccaaaattagttttataagtcttatcccaatgtacatcaggatttactccttgtttcggcatacgaatcgtagcacttgtatttgtactagaattagttccaaagatcggtcctttgtctggattacgggtgtaaagctgagtccaaagccaagcattcacattatctttaccaagaataccaaacgaaccacgtatcttcaaaaagtcgatttttgtcttgtctttatcaaaccatttttcatctgaaataacccagccggcagaccatgaagggaacattccccaataattctgaggagcaaatttggcagaggcatcagaacggagcataaactcaaacaaatatttatcatcatatgaataattcacacgaccaacataagaaagcataccagactcactgcggttaaacgtcacagtttgagcaaaaccttctgcattggaatccacagaactagattggccatctgtaaaaggtaatgggtctgtaagactaccattcaaatcttcccattctgattctgctttttcaatagagaacaaaccactgacataatgcttaccaaactgacgtgcatagcttactgttaagttcatttgataactatctgagcgattcatactacgccccaaagagttgccattattcaactcatacaatcccaatgtattagcattgtattcaatctcgtcaccaacataaaggtgaccaccactgccaccacgggatataaggcgatatacatcgatttttgtaccgatagtatttgttttccctgtacttatattttttgaataagaagcttttaccttcaaaccacgtaagtatttactccaaccaaaatcatactctaatgaaccgttaagagaaaaattctgattctgattctcaacattatctgacgcattctgtactgctgcaaaattatacttctgctgatcacttggattagttatattttccatacctgaatgaaaaatataatatccatttacttgatcaggcacataaggtacatgtaacattaaagattcaaaatcaccatcagagccaccaccttttacatttttaggtttatttgtctctccataattaccagatacctgcaaagaagctttcatccattttgaaatattagcatttacaccagcacgatagttccaacgattatagtccaagcgccctatattaccttcttgctgataatacgaaacaccaccgaaataagttgctttttctgttcccccgctaatgttgacactatgacgctgcgtcaaagccgcactccattctttatctaataaattataattcatacccttcattgcctccaattcatcagattgaaaaagttgtaccctcaagtcatcggattcttgatccttagtagcagtattagcagcacgagcagcattgtatatacgaccgtaatcataggcatttagcatcttaggtaacatcaatgcatctgtataaccaaactgtcctgaataagaaattttgggagcaccgacttttccttgtttagtcttaaccagcacaacaccatacgcagcacgtgctccatatacagccgctgcagcatcctttaaaacagtcacattttctacttcatttatatctaaattattgaaagcaccttcatctgcaataaagccatcaataacatatagtggagtagggcttgcattacctcctaaatcagaacttggagtaatggtagtattcactgaactttgacgaatctgtaagcttggtgtactacctgggcgcccaccactaagtgatacatgtaaaccatttattttaccagctaacgcgtcacccaaactacccactgacaaatctttcaattcttcggtggaaatcgtttcaatggcacctgttgcattacgtaatttctgagaaccataatcaccaagtactacaacttcatctaatttcagttgatcttctaaaagtacaatcctaggattttttaaatcagatataatttgtgaagtatatccaacaaaggaaactttcaatttgctttttggagcaaccttaatattaaatttcccatcaatatctgtcactgtacctactgtcccatttaccaccatgacagtagcacctattatcggttcaccacttacatctacaacaagtccagttactgtctgattctgggcacacaatggcataacaaaagtcaacagtgtaccgatgaataaactgagaataatatttttcttattcattgcatttaatttttattatcatactactttacttactcttcaacaagtggaagccaccgtggatcaccagttctcttttcaagctggcttgctccagttacagtaaaatcaccattcgcagcattaatgaagccaggatctgtatcaagagtatttgtatcatatttatcattactttgactaccattataccaataagtattatattcaaaatttctagacatatttgcattacccattattttattcgtcatatctcctttaccacaatctacaaaaatagttctggagaaatttagtgttaagcatgcttgtcctctatagctattccaattagtaaagtctttgctataagcaagattgtatactgtacaattataaaaattaaaagttccatttgaatatccagtaatcttgttaggtctgttaccatttacctgtgcaaaataacttccattctgtacagtactgcaaagagtactctctttaaatgttatattaataaaactacctttattaaaatacacaatcgtattagactgattacatctaataaaagaagcttttactgtaaagttttccacacaatattttttccctgaatcatataataaatgcctattaaggtcatatacattacaaaactgaataacgatgggatctttaataacgtattctccagaagatacttttaattgttcatttggagtcttacttaatccaattaatgaagcatcagaagaacctttctccattgcattacaatagaaatccataaactttatcttcaaaccattctgtgttaatattctaccactttgaccaaatgtaattttcgaatgattaattttatttccacgaattgtaactttacgtgctccaaaatctattggacctgatatagtatattcaccgttagcctctaattcatatgccaactcttttaaagtgccatcttcattaggttccatatcagtctctggaagcggattatcaataaaccattgagtcaaatctactccactaggaatggatgcatatgtttcaagtaaagttgaaaaacttatttcacaggctttttctgcatctttgttattaaactgtttatttccaatggttttaattaagaatttatattttgtatcttcttctacttccaattcaacgctacaaccatcgataaactctccttcaactacagctatcggattttcaggatcatcaactacataccaagaaaactcataaccttctgctccatgcactacaggccattcaatagttgcattttctcctgtggcatcaagttccacttttacattctccaattggggagattccagtgtagcatttttcacatccgactcaaaagattcgtcttcgtgataccctatggtacagctacttaaaagaaataataacgtagcgaataacagtccacgtgttcttcttcgtaaaaataaacgattacttttcatacattaaatttaaattaaacaatacgttcttatgttatcaatatttaagttgaatattatatacaatagtccgttaaacatttcattcacatttatgcagtaatggctgcaaaactaatggcttctttccacagttttcgatttatttctttgttcggtttgattcctaacactaaaataaatcgtttaatgagaaatatattatggcacagcactttaactgataccattaatgatgcctttcctttttctaatactttcactttagctatattcacactctgatgagtgaggcattaaagtgaaaatgcaatttattcagctccctactttgacagtcagttaatcttgtgaattgctttccatcttgataacaattataagaagcttcccataagctcttgaatgaagacatgttagtaaactacttaaataatcataaaatacatataccactcttctttttcttcatacataaaaaggacgtatgatttaaagatatgtaatcacataaaaagaacaaaaatgaagttaattggaaattatatgcaaaaaaaggcctcaagacacttttcctattaaaaggaaagtgccttgaggccacctttttatattaaattacttttttccgggaatcagaaaaatcttttattctgccaatgggtcgaaagtacccataccaccgtgagcataatcttcccaaccaatggtctgatacaatgtcgcattagtttgctgtgcactttgacgcaatccaaagaaataatatctgggttggaaataaggattaatgtccagcacattaccatcaagactgatatctttacgtgagaaataggtatcatagaatgtacatatacttgacacagccggatcaagaatcgtttctccgtctgcttccgtagcaatcttctcattcaatgtcagtgctgctggtcgctctacgtttttaatcggatcactgtcattatttgcagacccggtaccttcaacattgatttctatgcgatatctcttaccacgttcattcatcggagtcacacccaaataagtacaagtattacctccaaagccactcaatgcccaacttgcattcaaagcaccttgtcctacacctccgtcaaatagcatccaacgacgcatatcatacgcacgtttaccttcaaaagccaactctacctgacgttcatacaatatagcttcaaacaatttagcacggtcagtttcaatcgccgcatccaggccataattatttgcactcgtatagcctactctgccacgtacggctttcagcgccttgaccccttccgcatgataagtgccgcccgcaccacaagctgattctgccagattcagcaatacttccgcataccgtatctccatgtaaggagctgccgatcgtctgaatccctgctgatcaccactgctgttatcagtaaacacataaagactagtgcccaaatcaaaatcatccgaacgtttacgaacatagactcctctattcttagtgcccagcatatcggctgcaaaaccgcttctactcggattattacgctcatcagccgtagtataccaacaataattccaaagttcatagttcgcaccactggtataacgggttgggcataaaccagacatcgttgctcctgaaaaatcgacattgccactgttgaatttccactctacccccggaaatgcaaatgtacggtagaaacgcgggtcacgatttagaaagaactttttagggtcataatgaactcctgattccatcggtttcttaccgtcaatcatcgggaagatgtctattatttccgctgtaggagtctttcctccgcctccgtttatatttcctggtcggattccctgctcccacaagttgtatcggttgatgttttgtgaagcaataggagacacattattatataaagtaacaaatacggcttcgcttccacctgtataagtggcgaacattctggcccaattcttggcattgtcttctccgccattgccttcataagcaagtccgaagttaccttcattcagtttagtgatggcagcaaaattggcgtcgtaagcatctttccaacgagatgcgtcatcggcacggttaaaaagtggactagcataaagcaacaatgtacgaccttttagagcaagtgctgcaccggcggttatgcgtccgtaatcctgcccttcattctgccaacgtgcaggaagatagctggctgccagttccaagtcatcgcatataaagtctatacaagccttagtcgaggaacgaggaatgaccagattctcaccattaccatcacctatcaccggattctggacgtggtctacaatgggaacaccaccatacattttcaccaacagataataacgccatgcacgaaaaaagtaagcttgtccgagtaattgttctttctctgtctgcgaaagagtcgcacttcccgtcacaccttcaatcacattattacattcgcggatacgtccccaaggacttctttcactgttgattacataaaaataatcgggaacagtctgaatagtaagagatgccgtaggatcattgaaaatagagtagtctccatattcctccgtacatttggaaaaatcgtcatcaatacccgcactggttatatcggtcaaagcattggaaccttcggtagaactaggcaataaagactgatataaaaagtccacacgacttttggctgtttcataattttcgtacacaaccgaagcgtcatagcttccatatactttcttgtctttcagaaaatcatcgctgcatccagtaaaacagattagtcctgtcaccatcgatgctgtcaaacatattttatttatcttttctttcataatcttctttgatattagaatgagacattaacacctaaagttactttacgcaaattaggatatcttccataagtgcctccccatgtactccaaacaccatcaggataaggattgtaaaagtttaaaaggttctgagcagtcaaattcagacggcaactgctgatgccgatccgatttgtccattccttcggaaggctataagcaactgtcaaattacgtaatcgaacgctggctgcgctaactttccaaaatgtagaagcctgaccgtttatggcactatatcttaagtttggatatttagcactccggttcattggcgccactacattaccaccggcatccaatacatcttcatacacatacatatctttccacatggcagatacatttttatattccagatcatcgtatttttcctgacgtaagtctgtctgtacaagagcataagtaccccagcttgcaccaaattgagcactgaatgagaagttcttatacgaagcaccaaaattaaaagtcaatccataaggattattggcacgattggaaatcttcacatagtcattctgatcaatcacgccatctgcttcaccataagtaccatcggcattacgctgaccacgtacatcacgatagatcaacatacccggatgaatgttatctttcgtattcccaagataagaagtgatcttattcactgcgaaatactcttcgatatcctgataggtgcggaacatgccaatacattcgtatccccacacaccacggtcggaacgttcaccccgaacaatgtcatcaaaaccgggagtagcctggaatccggcttctttaatcttgttatcactgtaaccggtagtcatttttacccaataagaaaaatctttaccgattttatctttccaattcaaagtaagttctaaaccatacgtatcaacttctccaaagttctcaggagtagcctgcgtacctacagtagtcggatagaaagaagtacccgtgaaagttgtgaacaactcacgtcccatatcatagtaagcatctaatgtaatacccagtctactatccagcatcctgacatcgatacctaaattggtcttgtaggttttatcccaatgtacatctgcgttgacccctctttgcggcatttggaatgttgcaccactataggtattggtggctgtaccaaatataggacctccatctgcatttcggctataaagttgtgtccacaaccaaggttgtatattatctcttcccaaaataccgaatgaaccacgaattttcaagaaatcaatacctagtttttctttattaaaccagctttcttccgagataacccaacctgctgaccatgaagggaacattccccagtagttactaggagcaaatttggtagatgcatccgaacgaagcaggaactcaaacaaatacttgtctgcatacgagtagttcagacgaccgatataagagagcatacccgattccgtacgaccgaacgtagtcgtttgatccgcaccggtagctgtcgaattagattgtccatcggtaaagctgaaaggatcagttacagtaccggtcagatattcatattccgattctgccttttcaatagaaaacaatccattcacattatgcaaaccaaactgacgtgcgtagctgactgtcaagttcatctggtagttatccgttttattcatcgcacggctcaataaattaccattatccaaagtaaaagtaccaaaattgctatcatctatatttatatcatcgccagtataaaggtgatttccactgccaccacgttccagcagcctgtagacattcattttagtaccgatattattactcttattattgataatgctcctcgaataagaacctttcacttttagccccttcaaccatttgctccaaccaaaatcatattccaatgaaccgtttatggacatattatttgtctgattttgagtattgtcaggagaatcctgaactgctccaaaatggaatagtcgtacagcacttaagcccgaagacacattttccatacctgtatatataacaggacgtccacctacatatccgggcacaaaaggcaaatgtgtcattagagaattaaaatcagcatctgtcccaccactggttataccattacgtgagttattctgttcacccatgtcacctgagaactgtaaggaggctttaatccacttaccgatattagcattaacacccgcacggaagttccaacgatcataatctaaacgtcccatattaccttcttgattatagtaagatgcacccgcaaaataagtagccttctctgtaccgccattaatactgaaactgtggcgttgcgtccaagccgcactccactcatcatccagcaaatcgtagttcagtcctctcattgcttccaattcgtcagcctggaaatattgcgttcttctattatccgattccgattcaccggtagaagttccagctccacgtgcggcattataaatacgtccataatcataagcacttagcatcttaggttttttcaaagcatcagtaaaaccgaattgccctgtataagatatggaaggtgtacctaccttaccgcgcttggttttcaccaatatgacaccgtaagccgcacgtgccccatatacagctgccgaagcatctttcaaaaccgtaatactttctacttcactcacatccaaattattaaatgcatcctctgtagaaataaaatcgtcaattacatataatgggctaggatctgcatcacctccacgcgttgaattgggagtaatgctggtattgatattactttggcgtatttgtagacttggggtactacccggacgaccaccacccgaatttacatgcaaaccactcatcattccgctcaatgcatcacctaagttacccaccgaaagatctttaatctcatccggagtaatggtttcaatcgcccccgttatgtttttcattttttgtgtaccataacctacaataaccacctcatccagattagctacatcttctttcaatacaatctttggattattcaaattcgttattgtttgagaaacgtatcctacaaatgaaacagccaatcttcccccttccgggacgggaaggctaaatttaccatcaatatcacttatcgtgcctaccgtagaatctacaatcttaattgcagccccaataattgggtcaccaaattcgtccacaacaaccccggtcaccgtacgtgcattttgggcatagacgatttgcgcaaaggcttgtataaaaagcatacataagcctaaaatgaaatatcttttactcatagtattctgttattgtttatacattgtattcattctgttgtcggaagccaacgtggatctccacaacgattcgcaatatgctccgagctactcaaagtaaaatcaccgttagcagcattcacaaactttggctctaccttaatagctgttcccgaatggtctcgtccattctcatcactagtatcataatcaaggaatcctcccggaacagcactataataataagtattatatccaagtgtataatttacattaccataatttcccgcattacagatccgtctgaaaacaccttcagttcctgtggccgaacttacgacacagtctgcaaaaatagtattctgcatttccaaaaagaacacagcactattactgtttattacattattaaagaaacgattgttagtgccaatttgatagaacgtacaattactcattttccgaagcgatgtactccagccagatccgctaaagtttgacggagtacgtcctctcatctgaacaaaataggcagatccgggaaccgtataataaatagtactgtttgaaaagctcaaatctttgatccaaccttgaccgttgaatgctataaatatagtacttgctgtattaatgctaaccaagcaatcagtaatagacaatgacgacaaagcataaccattattacagtaatataatggtacgggaagatcttttatagtacaagattggaaaacataaggctgctgcactataccggcttctgtgctattgaacataacgacacctctactattagaagcactgtaagtatcagcatcaaaatcaaaatctataaacttaatttttagaccagctccgcgatttataaaagaagcatttcttttcattgtcagtttggcatgatttactttgtcgccacgaatagtcaatgtagtcgttcctaaatcaatattaccatccatttcatatacaccacctgccactaattcataagctatttcttcttctccttctgcaagaggctcaatcggatttgccgtaaaatattcggtcagattagttcctgttggtattgtttcacgtactcgaaccaatgtattataagtcatttccgtagctgcaacagcatcagcgttattatacttctgatttcctaatgctctgactgcaaccttatactttgtatcttcagtaatatcacgcgtaatcgtacatttatctacgacttcattctcttcgcctataacaactggattgtcaggatcatcaatattataaaatgtcacttggtacccaccggctcctagcactaccggccatttaatttccagagacgtaatatctacgtttctggtaaaagtccaaccttcagtcgacggtgattccaaggttaccccctgaacttccgatgagaaggtccaatcatccttgtatccatcgacacaagaactaaaaagaagtatagctgccgcaaatgccaaactatccctttttactcgcaagaataaatgtttactcttcatagattaaattttaatttatataaaatgatatattacatcatcagacatctattcacataaataaaaagatacaactaaaagaatcgtaatctcttaaaaagaataaaaaatagaatctgaagttttttctcttagttttattaaactatatcataattcccctccctatcattgttgaaaattttcttttaaatattttatattccaatcatcgttcttctccacatcttcacatcgttttaacttccactttaaccgattcatataaaggacgaatggataagatcattgtaatccaccaaaattctgctgattgataccataacggaaacagtgaattaaataaaaaacaaaatggttacaagcatccgaaataaaggatgagaaagcatcaatatctctataggattaggatttgattcgcatagtgaaaaaaaagtccgaacttttttaagttcggacttttaatatagtaagaggacatataatgtttgaagtccctcctacctattatctcaattattatattactcttgaaatacctttttcagatattcaatattcgttccataattcttcttcacgttcctcacatcatccttgtctcgtgagcgttctacaaccagccagcccctccagcccattttgtcaagcgtcttttttaccttattcatatccagccgctcattgaaaggaagagtcactccatccgtatctgtacagtgaatctggcaaattctattttttccaagaatcttgagttccttacatagatcccttccattctctaatgcattctgaaatttaaaatagatcttgataccgggagaattaatctctttcaatagtttcacttcttctcttgcatccaattgagtttcaatgccaattacaactctttccgaagcagccatatcccctacttccttcagccgttttattaaagctgtccgaagttccggagtttcctgccagcctgcttccactccacccaaagggagaaaagcgaccttggcacccattactttcattgcatccagacaatcccggactaattctttataattagcacgatctaaaaaagactgtccataaaaaccggacatagcaatagaaggaacctctaaattatagttctgagctgtttcacgaaatagctgctggaaatggggctcacgcaatttgttatcgaacatttctcttttaccgagactacccatatccaactcgactccatctcctttcaactcatacaccaattggaacgaaccaatcttctgacgtttcaatatcatccagtcacatacggcgatcttgtaacgttgttctttttgtttcgatgcagcaacagccagcattggaaaacattctgctacgattaatatccaaaggatatgttgaaataatttctttctattcatcatcttaattatacgctgatcgtataaaagacggatgaaaggaaactttgtaatcggctacattccaaatatttaatactaaaacggaaaaggggatatttataaaaataagataatgacactatcccaggtaaatggtgtcactataccactgatatagtgtcactatcgcagacatatagtgacactatctttttgaaaggattattcaggtaagatgtaaaaaaaataggctgccgaaccctgaaaagtccgacagccttgtcaacccaaaaacgatacctatgaaacactgtgtgttatttcaaatcaaatatcaagcgtttaccatgaacaagttcatcgtgggtaatgcggtatttattgaacttcttaccatccaataacaccttatttatataaagagtttccgatccggtacgattactctcaattaccagctcattttccttataccatttaggatccaagcggatcgttactttattaaataccggagtagtcaatgtatattccggcaatcccggacagtcgggataaaaacctatcatattgaaaatagcccatgcagacatcgtacctgtgtcatcatttccagggataccgtccggtttggtcgtaaagtacttatccagcagtcgctgtgtctctttctgtgtacgccattcttcacctttaaagtaagagaacagatgagcgtaagcaatatccggttcgttagccggatcatatagtccttcatcaaacaccatttgcagcttattgacaaaagttttctttccacccatcagtttagccaatccatatacatcatgtggtacatagaaagtataattccaagaattaccttcgtggaaaccgggatttggttcaaagttctctccctgcctcggattgaacggactgtagaaagttccgtccggaagaataggtcggaatgtaccgaactccttactataataatgcttatatcccaaagagcgtttatagaacatctccgcatctttcttctttcctaaagcatccgcaaaacgggaaagggcaaagtctgcgatataatattccagtgcatgagatacggagttatcatattgttcacgaagcggcacgtatccttttgacatatagtcatcattgtccggacgcatcagattttccgccccgggtaatgtagccgacttgtacatagcttcataagccagatctacgtcaaagtcacgcaatcctttcatccatgtatccacaatcactgggatacttggatcaccttccatcgtaagagtctctcttccatacaattcccatttaggaaaccaaccatgttcacgatacatatcgagcatggtacgtaccatttccatctgacgttcgggataaaccaaagtcaaaagctgatgtacgttacgatatgtatcccacaaagagaatacagtatatcgggtacctttcgttgtcaaaatctgatcgctctccatagccggatattcaccatttacatcctgcagaacgttcggatgaatcaacaaatgataaagtgccgtataaaaaactgttttctgtgcatccgttcctccttctacagtgatacgtgacaagtcatcgttccactgtgcacgggcatcggaaagcacctgttcaaagttttttcccgactgttctttatccaaattcaaacgggcattctctatgcttacaaaggaaactcccatctgtacttcgacctgttctccttcctctgtttcaaaagtgaagtaagcgcccacatcgtcacctgctatttcttttccatagcgggtatacaatttatatttgccttggtctcgatcccattctgcttccacacctgtcatcggacgttgctttttccaatatccggttgtggtgggaactttgttcactctcatcacaaaatagatgggaaatacagcttggggattataacagaaagtacccaatagtttcattccctctatttcgctgtcacttacacgacgaagcatggctccactctcattggtcaggccttcgcccaaatttagaagtatatgactctttcctctaggaaaagtgaaacgggcaatacctgtacgcggagtagcagagacttctgtctttatattatacttcgtcagataattggaataatagccgggagaagcctgttcatccttatatttgctcccatattccttatagtctacattcagttctccggtagtaggcatcagcaataaagaacccagttcaggacaaccgacaccactcagatttacatgagaatatcctgtaaagaaacaattggtatattcataaggcgtggaccaccaacgtgcatctttatcgtaagtattatcagcagaacccatcacattaaaaggtactacggacatcattccattcgggcaaacagctccgggattagtggtaccgaaatttgtcgttccaataaaaggatctacataatctatcaacagactcttttccttattcatagggggggccttaccctctcccccaaatacggggagaagggtgaaagccattgtgcaagttaataatatacgtctcatatccttcttagataatgctcgtccgttttgtaaaatcaattatttcctggatatagccgaaagccattcctacaacagtatctgcagctccataataaacagctacacgctcaccatcctgcaatgccgcacatgggaataccacattgggcacatcaccttgaagttcataaggtgcagccggacctatcagatattcacgggtacgataaagtaccttttcgggatgatccttatcgagtatcgctgaacccattgcataacggaaaccgttgcaagtagtgataacaccatgatagaaaagcaaccagccttcatcagtaaggaaaggtaccgaacctgcaccaatcttggtacactgccaggcactttcagggaaaggagtcactttcataacacaacggtgttcaccccagtatttcatatccggactgtagctgatataaatatcaccgaacggtgtatgtccattgtcgctggggcgacttaacatagcatatttgccatctatcttttgcgggaaaagtactccattacgattgaaaggcaggaaggcattctcgcattggaagaaatctataaaatcaaatgtataggcaataccgatagtaggtccatgatagccgttacaccaagtaatccaatatcggtcttcaatccatgtaacacgcgggtcatatttatattcggattcgatcatttccgtgttaccggctttaaattgaatcggttcatgactaatatcccaatgaataccatctttactgaaccctgtgaagatattcatctgtacagctttgttgtcacaacggaatacgccggcgaacccatctttgaaaggtacgacagcactattgaaaatactattggatgaaggaatatgatagcgtccgatgaccggattttgcgagtaacgccacattacatctgtacatccgacaggacgttcttcccagggaatttgaatcttattcataataattatttatttagtaattagttatctattatcactcaaaaatagcaatttattttttcttttttgaatcatcatacgtaaaaggtataaaataggtcatcaaaaaagcaggaattgttgcgatcagtacatagataaagaaactacggtatcccagtaaatcactaaaatagccgctgatcattcccggaagcataactcccagattcatgattcccgaagcaaatgcataatgtgacatctgatgtttgccaggagcaatctgctgcatcatgaacaaggtcagtccgacaaatccgaaaccatagccgaaatactccattgtgatacatgttccgatcagataaagactggtcggctggactacagcaaggaaagtataagcaaggaaaggaaggttgaacacgcaacaaagcatgaataaagttttcttcaatccatatctggcaacaaatattccacccagcaatgaaccgataacaaaggcggcagaaccaaagacgccattcaatgttccgatttctgtcaatgacagccccagacctccgacctctctggaggcacgcagaaacaaaggagcaaccttcattataaatccttccgccaatcggtagagaataatgaagaagatataatatactatatgttttttagtaaaaaagttcccaatcacatttaccaaatcctgcatgatttctgaggtagacttcttgccggtagcgggaacttgtgtagaaggcaacatctttatatgataaagaccgagcaataccattactgcagcaattacggcaaaaataatcatccatgcagatgaatacgcacccttattggcatctatcgaagctccttctatcgctccgaaatattcggccagcatacctgccaaagcaactaatccaccgttggcaaccaattttgccacattatagaaagctccctgtactccaatatatttagcctgatcctctttattcagttctgccatatatacaccatcgcaagcgatatcatgtgtggctccactgaacgcaatcaccgccatagtggaaatactgatagcaaagaaataatcaaagaataacgaaaaagctactactccaaacaatataccactcaacagttcggttaccagtacaaaaaactttttggtccgatacatttcaagaaaagggctccataagaatttgagtgtccagggcatcatgataagagaagtccaaaacgttatctgagtatcagaaatacccaaatccttaaacatgaatacggaaaccaaattgatggcaataaagggaagtcccattgcaaaataagcggtaggtacccaataaatcgggttgatagtttttccttgagaagcagttttattctgttgcatagttcaatagtatatagatgaaagggtcatttttctgacccatctatatataatacaactaagaagggcaaactactaacgcttgcccctacttttttttattttattgttacttcgtcgataaagaaccacgaaggatgccctacaccataatgccattcgggacattctttcgtaccggtgacctcaactttcacataacgggcatgcactggcatttccgattcagtcttcactccgcggaactccactttccccgaacggttttccggcatatcatgtgctccccaatgtgtataattctctccatcttcagaataggaataaaccaccttcagagggaaaagaatccaagctccgatctgatgcaggaaatccgtatctatactatgtatttctttctctttacccaaatctataacaaaagcaccgtctgttccttcccagccaatccagctttcaacgaaagtagatcctccgaatagtccgtccactaatgccgtttttccgatttctgcatatttaccggtaggaggaataagataagtaaccttcgctcctatcgcaacgcttttttctgcacggggcatatatctctcccgatacaactggcaatattccacaggagaattggaacgttcattcaatgtcggtacattaaattctttcacccgttcttcaaaaagtgccaatttcggactgatctcattcatatccgtaccagtctcagtacgggcaatttccaattccgaatactgaatgggcaagcgggcacgctgcacacgcttcaggaatttattatcttcagccaccgctttctctgcatcatcaaacagttgattataacgtcgcatcagttgtggtttcagcattccgtatttatgggaaacaggagaatcataaatccacaatctttgtccgctgcctatcaacgctccctccatcaccttgatatactgataaaggtatggcgcagcctctccatagtatccatgcaggaaatgctgcatcaaagaatcaacattcgcttcggggttccacattaacttagataccagataggcacgtaactcagcgaagtctcctcccctgcttcctgcaatctgtgagaaatgcatagtggcatgattctttttgaacagacgaatattatcctgcaagatatgaaaattagggaacggagccagataattatcaaaattaataccataatcccacacgaaaatattattagtgatggcagcccagccttccattgctttcacaaactctttacctgaggcattttccgtcaaagtcacttcacggtcacaatctatatcacaaagcatgatattcacattcggcaatggcttcacatgtttcggaggattcatcgtatacagataggcaagcgtggaaaattccttatcgggaaaacgggcagccagcttattcaaaaaagtaatgatacttcctgagagtgctccttcataatcatctatcgctttgcaggcatcacatgtacaattggtataattaccatcattctgactcacagacataatatgcttatccggatttgccttaaaaatagaatcaatccgctgagccacgatttcaaaaacttccgggttactcagacaccattggcttgctttcccgggatggcgtttgcctttaaaataagaataatattccggatggtcttttccatatacggaagcaggaagcaacttatcaaaagtatgcacccaataaccggcagcaaacacttcgtttggctcttccagcctgttccaccatttatatatggagtctgtacgaatagcataacattgtgtctggcggtaacggaaagccggattatctattttatcgataagcggcagttcgattgtcttcgcagggttaaaagagtattcgttttctccccagtaatccactccaagatattgttcgagtaaagttacaactccgtagaccgtcccattcccactgcctgaaatacgtaagattccatctttcgtagataggctgaaaccgtcttctgtcactccagctggggttttgctactgattataatatctcctttttttgcattctgcccttttacaatgggaaatgtacaacctgaaattctctgaaggaacaattgaaataaatttgctgatatttgattaatctggtcattttctgatagaataatcctggatttagtttttccattatcaactaaaacgacttgtgctgttgcaggaatataacaacatgctcccaacaaacaaagcagctgaaaaataatacggcgaatgattctcatagcatttcctttaattagtttttagataatacaatccaaaaatataagatactcaagaaaaaaatcagttctaagttttattaacaaagaaaacttagaactgatcacaacatgatataaacagcaaatagcccaagctcattcagtaataaacttgggccattttttattcagtttcagtataaatacctacagtattaatataaggagaataataaagagctccatggaaagttactcttatatattgcgcttgtttagccacaagaagaagaatgtaacttgtcttatttgcaaatcctgaagctacaccaagatcctcatatttctctccatcattacttatcgctatacttgcactttccgaagaataaaaccatttatagaaatgtaaagcaatagtttttatattctcttgttttcccaaatcgatatcaagtatgctgccatccggaacataatcatacaagtcgctagattgtccattcaaagtaaaactccaacccgaatggtcatttattacagaacctaccggtttgtctacacaagataaaaatccgacaagtgctgttttataaacaatatatataactttattctcgcctatatctgctcctactccatcaacattcgtgattgtcactggaataacatagttagtacccagctgcacagaagccatatcatccgaaaaactcaaggcaacactctcttccggagttgtttttccttgtttaatcattattgtcgattgcttcaaacttgcactagtcagtaaagaataatctgtgccatgcaatgcattatacgttccaactaatgccggattaatagcaagagtaactttggtgtcaccatctgtggcccatgccgattttaagataccgtcaagcttccattcactgcttaaatttgtaaatccttgactatactgatactctaacagatattctttacttgaagtcagtgtgacatgatttggtttgtaagtcgattcaaatgtcaagaatatcttactattactttcactcgctgatactcctgttccattaatagaagttatagcaatcgggagaatataattttccgatccgttcttaaattcttccatattagtataatgcacttttaaagtatctgcagagatatattccccttgttttatatacaaagttgcattttccagttctgcattttgtaaagctacatagctcgttccatattcactgttgtatgcatctaccaatgacctgtcaatagctaattggatggtcaaatcttgtggtgcaggtttagtacacctgacaggagacaaaatatgttcggtggcgatttctttcaaaaaagttccgtctcctttatactctaaagtagcatttgtttcacttggtttataaatatagacataattgatatcatacggatctgttgcttcgtcatcgtcacatgctgtgactaatggcaatgacatagcaaaaaatgtactgtataatatatatttaaataatgctttcatatcatactgttttaaattattgagcaaatgaatatgtttcccatgtcaccttttgacggttttcgttacctaggttagaattgccaatttccacatcatgaccattaccggttacatcgtgtagtattgtagctccttcaccttcattcattggcagatacaacaacaaattcttgtctgtatagtcaacttcggtatacatagatttctttatctgattaactgtgcgtgtaactttccaaaaacgaacctgacacatttcacagaaatccggaaaatattcttctcctgaagaaatcatctgaaattgatcaatattcatcggttgtcctattgaagaagataatgaggcaactacagtaccattttggtacaataaagtagtaccggatgctgcatcataactcactgcaaaatgataccatttttgtgcttctaaaccttttcccttagttggatcacctgtatcaaattgagaccccatcgtttttacttgtaggaaattatttttatagctaccattctcggaatagattaagtcaccaaaccgtatatatagttctgtccctgaacctcctgagtttattatagcctgattattcttagtatatccaccgttccctgatttagaggtgactttactccaccattccaatgtataatttggcaaagctaacccccaagctccttccggggctgcatgcataccattataccatgttaatttaggaacagcttgtttcaaaggcttcacaagaaccaataaaaaactggaagaggattccgacttctcaatacctccttccacattcttaatactgatgggaattgcatattgagcaccgccttcagcttcaaaacttttaatatcaacattcacaggatctgcacttacagaacctgcttcaattgtcactgattcaggaaatgatatatattctttaggaggcattttataattagtttcattcttcttattataagcatctaatacagattcgtcaataaataaattagcttttattgtttgattaataatattcaccaaacgtacagttaacgaagtacgcgtcgtaccctctgtcaatgtcaattctttagttttggatgtagacgcttcatttatatagactaaattatctataacatcatacttagcattttcacatgcagtatggaccagtgccagtaccccaaatgccattattttaagtaaagatattctcttcattgtttaaccctttcttttagttattaataggaggattctgtgcagcaatagctgcacgcactgtgggataatcaggatttccaggataatcatactcaatatgataagcccccatacctgcatgttctattccacaagccggatgatagctctgttgctcggtaaagtaatgcttatccactgctctttcaaaagttgcagtcacaatagatttccccatagcttctttaaagacattagggtgacttctacgtacagcttcaaagaaagaatccaatccagaatgtcctagttcataggtctgccaagctatataatcaagacttagaactgtttcctctgaaagcacttcataaaagctcaaccaacctgcaccaccagggatatcagcaaccaacattttccccgtcttatcaaactcctcacgtaaagtcttcataaacgcattgggtactgatggcataccggagttcattaaagtcccccaatcctcaatatcataatcaaatccatcgatattatatttgttacatgtatctacaatagcaagtgcatatttcttagcagcctcaatgcaagattgctcatctttaggatcaaagccccaaaacgcttccttcactgcatcatcgttaccccccggtgtgagattatcaccaatatctcctgcgcgccaacaaagcactgctctggaacccttagcctgaaagtcttttaaatcagcctgttgctcaaccgtcagatttccccaacagagccaaaggctcacaaaatccgtactgtccggtaatccacataaagcatattgcatggaagaacctcccttacctgcccagttaccaaaccagccaaacataatcttatgtggagagttaaaataatccttcaaattattttcataaccttgcgtaggaggttcataataatctttcgcctctatgtcggtccaatcactacatgcgatatttaagaatccctgcgaaaaaaagagagaaattcctattccgtatattatttttttcaatttgctcgttttcataataaaaattattttaacgttctgatttaatttttcttagcccaccaaagatctgtggcagagttatctgcaccacctaacattgatacagctgctttcacatttgcattattcgtattatattctgactgagggaaaggcaaacgacgcataccacgctgcactgtcaccccatctgtattcagattattcacgatagggaatagtttaggataacctgtacgacgaatgtcagcccacgtttcccaaccattcggaaaattggcaatccacttctgaatcaaaatacgctccaaattctctgtaacacttgctgattcattatatttcggagttacagttgacactgctactatatccttacctgaatccgaaggatcactgtaagcagcaggaaccttttcacttttcaaataatcgccaatagtagctttacgttcttccatagacactgtcactcctgcgtcataaagttctttgggagttcctcccatattccatttatacatcaatgcagcttctgcacgtaaaaaataagcttcagatgcagacataatgagcaattcatcatctataccaatattcaggcgggagaattttgtataatttgcctgagttgtagcactttggtaaataccatttcgcactcctatttgtcctccaccgatagaagcatctgcttctgatgcatatttagccaaacgaggatcattataaccgcttaaatatgaagtgatattagcactgatacgaatttcattccatgaagaagtaacacgataatatggattcataccgtcattatatttactatatgcagcatctgatgcagatgtcatcacaccaattacatcagaaacagcttcttctgctttctccttggcaagtgctggagaaacactagaaatgcgcattgccatacgaagctttaaagaattggcaaatttcacccatttgttaaaatctccattaaatacaagatcgtattctgataaagaactcatatcttcattacctaacactgctactttaaaagcggaaatcgcttcatccaaatcatcaaacatgtgtttataaagatcctccatattgtcatattctacagtaaaagcagttcctgtaatttgagaataaggaatcggtccataacaatcactaattttaagtgaagctgccacacgaagaatctgtgcccattgataagccaatcctttgccatcagaaagatcacgtatctggaaatatccggtataaatctgtggcatagtagtatcaaacatatttccataccacccaactcttggattgtaagtataataattacctccattaccccattgggcgatacaagtaatttctccaccatattcagatccaatcatctgatccaacatctgtgaattgttctgttgtccttgtactaatgcaggaatcatgcttttaatcaatgatccggtgattgcattatcacccagcatttggtcaggtttaggtccaaagggatttgtattatactcttcaaatttatcggtacaacctgttcctagtgctactaacaaagtatacacagacagttttgcaaacttctttattatcttattctttttcataatctaaactagaatgttagtttgacattaaatccgagacttctcaaactaggttgttgaaaatagtcaaccccctgatagaaattactagtgacagaagatgtactttccggatcataaggtgctttacaataaatcatccataaattctttcctgtaagccccagtgtcatatttacatgatttttgaaccatgttttaggaagttggtagctcaagctcagttcagaaaggcgaatattcgttgcactatatgtataataagtaccaacagcggtagttactttactataatattcctcagcatccactttactgtctccaacccatacaccgcctgcctgacgagcaactgcagaactttcagatacaccatatttatcaatcatggcttgtgtatccgatacaactaatcctccaaaacgcccggtgaatgcaaatccaagattccatcccttccaagcaacactaccattccatcccaaataatatttaggaagaatagagccaaccttgcggtattccgtattttcaatagccaaacttccattagaggggtctttccaaatatatccattaggagactgacgcaaacgctgattgatataaatatctcccattgatccgttttcatagagtcttaaagtcggaccaccactagttcccaatgttccttttgagtaatactccatttcgatagcttcgccggtttccggattgatggcaccattcgctaaactaacgatcttgttttgattaagagtgtaagtgaaatttgtagataccttcactttatcaaatgtatcagaatatcctaaagccagctcaataccctgattctgaatattaccagtctgcacaatattattcttatatccagatgaagccgatgcatcaacatagaatgtctgattgaaggtattagaacgatagaaggtcatatctaaattaatacggttgccaaggaatttagcattgacgcctagttcccatgattttgtattttctggtttcagattagtattataatgacttgcaggatattcatatgtatttgtttgctcattataagtatattgcatttgggtaaggtatcgattaggggaagaagcgacctccgcccacgaaccacgaactttcaaataagaaatagcttttggtagctttacagattcactaacaagccatgacagaccaacagacggataaaagtaggaacctttgctggtaaaagctaattgagatgcccagtcattacgcccagtgacagtcaaatacaattgatgattccatcctaattctgcacttgcaaaaacactttgtacttgatcatgccattttgattcattacgcttggaagtattgacattaatattgccataatggaagaaattaggaatttgctccaatcctccctttagatacatagcatcttcctgaatatcattaatagaagcaccaacagttgcattcaatgaaagtttgtcatcaaagaaattcttatttatgctagccattacatcagcataaacagaccgatcattttgtttagtatgtccataataacctttagaactactttctgtaaaagtacctcgtgtactagcataatacttttcataactatcgctatctgaattatccacacgtactcgccctgttacattcacccaatctgttatatcccaattcagactagcattaaacatataacgacgtttagaaagctcattctgcattcgattcataatccaatatgggttttgcatatccaaatcagtaccaaatatagattccggccaatattgtaccataaggtttcgagcctcactatagcgttcatacatctgtacttcctgaaagttttcacctcgtggaaaaagataaagagataccaagggattaaaatattgtccactacctaccatattcttattattttgaataatatattgagctcccaaatcaagactcaacttattatcacagaatttagcagtattacgaatagagaaattatagcggttataagcattattaggtaagatacctgtagagtttgtagtagagacagatgcgtaagtttgattttgttcagtaccagtggtcaacgtgaaaccattcatctccgtcattcccgtattgaagaagtcagatggatcaaagttgctaggagtatccatcaagctcccccaactgcctaactctccttcacgattaccataaatattctgaaacttcggcatcatcatcggagatgaaaaacttgtactattactataagaaatttgcacttttcctacagtaccttttttagtagtgataagaataactccattagaagcatccgaaccatacaaggctgcagcggaaggtcctgttaaaattgtcatgctctcaatatcttcaggattaatatcagctacgctattagatcctggctgtttgttcatcgtacctccagcattatctcctgaatttacattaaacattggaataccatcaataacataaagtgcattatcatttttctccaaagactttgtaccacgcataactacacgagccgcagccccagcaccggctgaagaagcatttattgttacgccagctacttttcctgataaagcattaataaagttagcatcctttatattagtcaattcatctccctttacttgctgtacattataactcaacgctttttgttcacgtttgatacccaacgcagtaactactacttcgtccaaggtttgcgtgtcttcacccattgtgacttttaggggttgggcgttggcaagcgtgattgattgggaggcataaccgatataggagatttctaacacatcacctttggcagcttgtattttgaaatttccatccatatcagtaatcgcaccagtagctgttcctttcaccagaatgctaactccaattaaaggttcaccttgtgcatctgttactgttcccgttgcaacgattggtgtttttttctgttgttctacttctttcttagtagaaagtacaatatgcttatcgactattgaataactgatatttgttcctttaaacagctgacccataacgttagtcagcgactctttagaaactttaatagatatgacacgattaatatcgacgtcatttgtgttgtatactactgacattgaagtttgtttctctatctctttcaatgcagtatttagaggtaccttcgatagattaagggtaatcattcgttcctgcccataagctgaggcaaaactcgaaaacaataaaaggaaaaataacaagtatggaaacttgtgttttataatttctttcatcttattctttttaattagaaatagtttttaggtagttaacaaacatgtgcgggtaataaatataaccgccactcatacaaaggatctatgtatctctgtttctcatatttataaatttaaaggttacactaaaaatgatttttcataagcgcttatttatcagtaatacatttgatactgcaaccatactaaacgaaaataagattttttttcgtaaaaaatggttagactaagcatttttttgaaaaataaatacataatcatttgataaatagagcattaagtagttctgaaaaactattcaatttattacatttgcatgcaatttgcatatattcaaataacagatagatataaagaatcattttatgttcaaatattcaaaagatggagtttctgtattgaccatattagacaccagaagggctaaaattaatggattatttccagttaaagttcaagtcgtatttaggagaaagcagaaatattattctacggggaaagaattgtcaaaagaagactgggatagattgttaaaggcaaaaagtcagttattaatggaggtaaggactgatatcgaaagtagtttttctattataaaacaacaagttagcgaacttatccaaaaaggagaatttagttttgaaatattgagtatcagacttggaaggcatacgaaagaaatcaatctgcgtacagctttcgaattaaagatgaaggaattagaggataatgagcaggcaagtacatatttaaattatcgaagtgctttgaagagtttagaatgttttggtggtaccaatattccattagacagaattactgtggagtggctgaagcactgtgagcggttttggatttctaacggtaagagctattcaagtgtgagtatttattttcgaaccttaaagtgcatattaaaccgtgcagtacgagatggaatactgaaagaatcatcatttccttttggaaagaataaatatgaaataccagaaggacatggtcgaaagctggctctcactcttcctgagataaaaagagtcatgtctttccaggattctaccaatgaattagaggaatttcgtgatttatggttcttctcttatttatgtaatggaattaattttatggatctgttatttctccagtactcaaatattgtagatggagaaatctgttttatacgttccaaaacatccaggactactaaacatagtaaagaaatacgtgctactataactcctgagatgtgggatatcattcataagtggggaaaccctaatataagcccacaaacctatatttttaaatatgccaaagggaatgaagatgcttttgaaaagatcaaattagtgcgtcgtatcgttactaaatgtaatagaaaattaaaaaaaatagcccaaggtacaggtattgctcaactgactacttatacagcaagacattcatttgcgacagtactaaaacgtggtggagccaaaacgtcttatatttcagaaagtcttggtcactctaatttaactgttactgagaattatttagcatgttttgaaaaggaagagaggattagaaatgctcgactactgactaatttcgataataaaatgtaaatttgaatggtgcatgcaaattgtatgcacaacgctactttttgtgtttattgcataggcataaaataaatgagtatacgataatatgatgaattatagaaaaatctcattgtgtctaatatcattacaagatatgattaaccatatggttaatcatatcttgtaatgtcgcattttataaataatagaaaacatgaaatcagtaaaatcagcacattcttaaaaaaatgcatatttaatgtgtctagaatgtaatatattacactaaactatataagaattagaaataaaacctttattcttgatttgtattcaacggcttgatttaaataaacgttattaataattatatggttattaaatcgtttaaaatacaggcgttttaatataaataacaatatatagaatcatattgtcatttcagaatcaagcgaaaaattaaatcaaatagagaaaaagttctttcaaagtgcccatatttatcttggttttaaaggaactggtgtttcctttaaaaccaaaatgccgttccttttaaaccaacgactgctccgttcgtatattttaaagctctttcatagaattgaagatggcatttttatgcactaagcaattgttttatgcaaacacatcgcataatcttgcaataaattatacatttttttgctatttattagatttcatagactttgactacctggctattcttagaaatagaacataaagaagtatgaaaacagctataaattcattactcccaagcaatcacgttgaccaatgcccagccattgaaaataacaatgggggaagatacacaaaaattggatgaagttgttgttactgctttgggtatcaaacgttctgaaaaagcacttagctataatgtgcagaaagttaacaatgatgctttaacttccgtaaaggatgctaacttcgtcaatagtctaaacggaaaagtggctggtgtgaatatacaacgcagtgcttccggtgtaggaggtagtactcgtgttacaatgcgtggtaacaaatctattagcggagataacaatgttctatatgtagttgatggtgtaccaattggtaatcaagctgacagaactggcgacggaacaggattcggaagcggcagaacttcaggtgaaggtatcgccaatttcaatccggatgatattgaaagtgtgtcagtattgactggaccgtctgctgcagcattgtatggagcaagtgcagcaaatggagttatcttaatcaatacgaagaaaggcgaagctggaaaaatgcgtatagatgtatcttcttcagtagagtttatgacaccgctcacaatgcctaaattccaaaatagatatggaatatcaggaaactattattcgtggggagataaactggaaaatcaatcatcgtatgatcctaaagacttctttgaattaggggcaacctttaataattcatttaatctttcaaccggaaacgataagaatcagacttatttttcgattgctgctgtaaattctgatggtattgtccccaataacaagtaccaccgttacaatgtgacattgagaaatactgctaaattcttgaatgataagctgacattagatgcatctgcaagttatatacgtgagtattataacaatatgatttcttatggaacttattttaatccaattgttggcgcatacttatatccgcgcggtgaagattttgagaaagagaagtattttgaacgctataatagtgaactcggatattctcaacagcaatggagtcccggagattttggtatggatatacaaaatccatattggattgcctatcgtaacattcgtccggaagtaaaagaccgttatatgttatatgcctctttaaagtacgatattaccaactatttgaatgtggcaggtcgtgtacgtttagataatacctatactgaaaaggaagataaacgttatgcatctaccataaacacatatgctagtacaaacggacgctatacatactctaacgagacgtttcgacagaaatatgcagatataatggtaaacttcgataaacagtttgctgaaatctatcatgctacgatcaatgcaggaacttctttcgaagaatatgatacaaaaggacgtggatatggagggcagttgctattagtaccgaataaatttgtatatagtaatatagacccgacgcagagcaccgcaagtcaaactggtggagacagccgcaggagaaattttgctgtatttgcttctgctgagttatcatggaattcggccttatacctaaccttgacagggagagccgataagccttctcaattggtaaacagtgatgatccgtggattttctatccttcggttggtttgtctgccatcgttactgaactgttacccaataatattaaagagaaattagagccaactttaggtttcctgaaagtcagagcttcctatacagaggtaggttcgccgatcccctatacagggttaactcctggaactctcactcacgaacttgaaggaggaacctttaaaccttttaaatattatccgatttccaatctgaaagctgaaagaactcgttcttatgaagtaggtcttgattccaaatggtttaataatacaataactttcggagttacgtattatcattcaaatacatataatcagttactgaaagctacattgggtagtaattttgaatatatgtttgtacaagccggtaatgttcagaatagaggacttgaattaagtttaggatttgacaagaaatttggtgattttaattataatacaacgttcactgcgacgacaaataaaaataaaataatccaattggcacgtgatgtcttgaatccggtaacaaataccttgatagatttaacggatattcaggttgggcgtttccgtttgagagaaggaggagaaattggtactgtatatgcaaatgaatggctaaaaagagatggtgataattatatagactatcagccaggtcaggcattaactacagaaaccacctcaccctacaagctaggtagcgtgaaccctaaatggaatttgggatggcagcatggatttagttacaaaggatttaatcttaacttgttgttcacagttcgtattggaggaatcgtaatatctaaaacacaagctatgttagacagatatggagtatctgaagcatcagcagatgcacgtgatgcaggtggtgtatcattaggatatttcaaagttgatccaaaaacttattatgatgcagtttctaatttggatgcctactatacatactcagcaactaatgtgagattgcaggaagccagactaacttatactttccccaataaatggtttaaaggaactgttaataatttgagcttgtcagtatacggtactaatttatggatgatatacaataaggccccttatgatcctgaactaacagcttccactggtacttttggtcaaggatacgattactttatgttacccagccagtctacttatggattgagtttgaaatttggattctaaaataaataaaggaattgaatatgaaaaaatatataattctgcttttggcactttgttctatgtcagcttgtgattatgaagctgtcaataccaatccttacggtgtctccgatggggaattaggtcctcttaaatatggtgcccgtttcatgaatatgcagcaaagagtgatccctataggttcacctagtttgacaactggacctggaaatgatttacaaaatactgatttgatatcttccggtaactatattggttattttggcaataataataattggggatttaataatgaggctaattggaattttacagatagtagaatgaattatgcatatcagaacttttactcgcaaatctttttgccctggaatgaaatatatgaaatcgctaaagattcggattccccatcagaacaagctatattggagattgctaatattgtcagaaatatagcatggttgcgagctacagacgttttcggtcctattgcttataactcagcaggtgatggaagtattgcgccaaaattcgacagccaggaagttgtttacagaagcatgctggctgatctgtcaaaatcagtagaattgctgaatacaatatcttatagtgtgatggctcagtacgatttgatatacaatggcaatgttcaaaactgggtaaaactggctaactcattaatgttgagaatagctgtcagagtacattttatagatgagactttggctaaagaatatattacgaaagcattagatcctaaaaatggcggtgttatcgaagatatttcaagtgaagcaaagatcaaaagttctgataaaatgccattgctgaattcaatgttagcatctgtcaatgaatataacgaaacaagaatgggcgccactatttggggatatttggatggatataaagaccctaggttaagtgcatattttactgaaggaacatatggttctggcagttgggcgcaaacaggttattttccggttgcaccgacgaatagtaaatctaaatcggaaacctcatattctgcaaaatttgcatcgcgtccgaaagtagattccaattctcctttatattggttcagagcatccgaaactttttttctgaaagcagaagctgctctatacaatttgataggtggtgaccccaaaacgttctatgaacaaggaataaatatttcatttcaagagcaaggagtcagtggagttgccacatacctgtcaggaacaggtaaaccaaccggactcactggtagtaattacaaatatggcacttataaccatgatttaagcattggaaatacttcacccaaatgggatgattacacaggaaatttgagtaagcaagaagaacagttacagaaaattattacgcaaaaatatctggcactatatccgaacgctgtggaagcctggaccgaatatcgcagaaccggtttcccatatttaatgaaacctatggatgaagctgctcctggaagaattggcgcctcaatagaagattgcagagttcctgaacgctttagatttgctcctacagcctataattccaatcctaatatggctgaaattccaacattgctgggaggtggagatataggagctactaaattatggtgggtacgttcaaacaggcccaaacaacctaatcagtaataatgatattcatttttaagaaaagaaaattatgaaattattaaagtatttgtgtataggtatatctgccttaagtatactaagctgttctgactggacatctgaagaaagagaggtttttgagaatcaagaaggaatgcaccgtctgattcccctaatagaagcccaaactgaagaagatcttacaccgaccatgcgtgaatatttcgctcaaataagagaatatagaaaaactcctcatgtgaaaggctttggttggtttggtaactggactggaaaaggaaacaacgctcaaaattatttgaagatgttacccgatagtgtagattttgtatctctctggggaacaagaggttacctttctgatgaacagaaagcagatttgaaattcttccaggaagtgaaaggaggaaaggcattattatgttggattattcaagatttgggagatcagctgactcctaaaggattgaatgcaacgcaatattgggtagaagaaaagggacaaggaaacttcattgaaggagtaaaagcatatgcaaatgctatttgtgatagtattgaaaagtacaatcttgatggttttgatattgactacgaacctggatatggacattccggaactttagcaaactaccagacaatcagtcctagcggtaataataagatgcaggttttcattgaaactttaagtgcccgcctacgtcctgctggaagaatgttagttatggatggtcagccggatctcttatctacagaaacttcaaaattggttgatcattacatctatcaggcatactgggaatcaagtactagttctgtaatttataaaataaataaaccgaatctggacgactgggagcgtaaaacaattattaccgttgaatttgaacaaggatggaaaactggtggcataacttattatacaagtgtgcgtcctgaattgaacagtatggaagggaatcagattcttgactatgcaacactcgatttgcccagtggtaagagaataggtggtataggtacttatcatatggagtatgactacccgaatgaccctccttacaaatggttgagaaaagccttgtattttggtaatcaggtatatcctggtaagttcgattaatattaaagaatgactattatgaaaaagaatatttatttagctgttctgttattcttaacaggttgtcaaaatgagttatataaaaatcctttggatgattttcaaagtgagcaaggagtatatatagctaataacagcgtattacaaagctttgtggaagaaggcaaagatgtggaaattaaagggctgcaagtagctttagctgttcaagatactaaagaaataaaagttacattggaggctggtaatcaagctcagttagatgcttataatgctaaaaatggaactaactatatagtacttcctaaagagatgtatgagatctcacagaaaataacatttatgcctctttatgcaatgatggatgttcctatttctttgaagaatgtaaaattctcactagaaggtaactatgctttgcctatacgtattacaggaggtgacgtgaatattatcagagggcaagaagagactttacttgtacttgagcaaagagtgaatacaaaagcgctccggataagtacaagtggaagtggttcggggagcgaggatgataaaatgttccctaacgatttcaaagttgatcaatggacaatggaagttatggtcaatagggctagttacaaaagtaacaatcgttctatttgtggaactaaattggttgccaatgctggtcctatggatgagatttatactcgtttcggtgatgtaactattaaccctaatcaattacaaattaagacgggaagctctcagattgatgttcccgctgacaaattctctgcacagcctgacacttggtatatgttagctttcgtatatgatggtcaaaagaattatgtatacgtgaacggagtgctggttgctgaccgggaaatcagaacaggtccttatggattgattggcttttggattggtggttcaaacgagctgattcgtgaggttcgtttttggaaaacggccagaacttcgcaagagatagcttcgaatatatggaagatggtaaatcctgacgatgacaatttactgctttattatccattgaatgggaagaagagggatagtgctaccggagaaattacagaggatgagactctgctttgggactggagtaagaatggtaagaatttacccaagccatcaagttattcttttgatgataacaaagggaacgggtttatattcccaccgcaagaatagcaacaaactacaataaattgtacatatagaaaaggctgcctttggaatgaggcagcctttgtttttactatacattataaataataacgacataaataaagagacagaactatccactcaacaattcatatatttacacaaatatatgaattatcaaatacaaatattaatggttatatttagtatgagatgttcttctctcatactactccgcatatctcccaatcaatcacgcttgccaacgcccaacccctaaaagtcacaatgggtgaagacacgcaaaccttggacgaagtagtagttactgcgttgggtatcaaacgtgaacaaaaagcgttgagttataatgtacagcaagtaaagggagaagctttaacagcggtgaaagatgccaactttatcaattcgcttgcaggtaaagtagccggtgtgcagataagcagcggtgctacaggtgccggtggtgctacacgtgttgtaatgcgtggtatgaagtcattgaccaagaataacaatgctttatatgtgattgacggtgtacctatgtttaacacaggttcaagtggtggtgacggtcagtacggatcaatgggtggttctgatgcagtagcagacttaaacccggacgatatagaaagtataagtatgatgaccggaccgtcagctgctgccctttatggctctgccgcagccaatggagtagtcctggttaacacaaagaaagggaaaaaagaaaagatatcacttactgtttccaatagtacgaccttctccaaggcatatattatgcctgagatgcagaacagatacggaacaagttcaggcttgttcagctggggagatctgacagataaaagatatgatccgaaagacttcttcaataccggtagtaatattataaactccattacattatcgacaggaagcgataaaaatcagacttacttctcagcttccacgacaaattcagatggtattttaccaaataacagctacaaccgctataactttaccgcacgcaatacaactaacttcctgaatgataagctgacactggatatcggtgcgcaatatatcatacagaataataccaatatggtatctcagggacaatattacaatcccctacccgctttgtatctgtttccacgcggagataattttgatgaaatccgcctgtacgaacgttacgatacaaattacggatttatgaaacaatactggccttatggcgacggcggactgtctttgcagaatccttactggactcaaaaccgcatcagacgtacctctgacaaaaaacgctatatgctgaatgcctctctgaaatggaaagttacagactggttaaatatcaccggacgtgtcaatttggacaactcggattatcgtaacaaaacagaaaaatacgcttcaacacttgccactttctgctctgtcaatggtggttttgaagatgctatgcgtcaggaacgttctttatataccgatttaatggctactgttgataaaacattcggagatttccgtctgaataccaatataggtatgtcactttatcacacttccatgcagacaatcggctttgctggtgacctgattatacctaacttctttgcactgaataatattaattacgctgcaaactataaaccactaccggacggatacgatgacgaagtacaaagtatattcgctaatgtcgaattaggatggagaagtcaactttacctcacgttgaccggacgtaatgactgggattccaaactggctttctccaatcagtcttcatatttctacccttctgtcggcttatcggctgtactgacggaaatgttcgctctgcctaaaatcatatcttatgcaaaagtacgtggttcttacacagttgtagcctcttctttcgaccgctacctgactaacccgggatacgaatataacagccagactcacaactgggcaaacccgacagtttacccgatggacaatctgaaaccggagaaaaccaaatcatgggaaatcggtctgaacttgaagttctgggaaaaccgcttcaatctggacgcaacctattatcgttccaatactttaaaccagacatttaaagtagatattccctcttcctccggatataataaggcaatcgttcagactggtaatgtacaaaaccaaggaatcgaactggcgctcggcttcaccgacgaatgggcaggattcagatgggcatcaaatgctactttcactctgaaccgcaacaaggtaaaacgtctggcaggcggtagcaccaaccctgtaacgggcgaactgatcgatatgccaaacatgcctgtaggatggcttggtaaagagaatgtagctccccgagtaatcttgacagaaggaggtacaatgaccgacatatacgtgtacaatgaattaaccaaagataataacggaaatataaaagtggatgctcagaccggaggacttagtatgcatacggcagagactcctaccaaagtcggaaatttgaacgccaactataatttaggctggaccaacaatttcacttacaaaggaatcaatctgggagtcgtactttccgcacgtgtaggtggtctggcatactcagccacgcaaggtgttctggactactatggcgtatcaagtatcacggcaaatgcacgtgacaataaaggtgtaccaatgaataacggaaaagtagatacacagaaatactatcagaccatcggtaccggtgaaggcggttacggaagatactatttatacagtgccaccaatgtccgtcttcaggaactcagtcttagctatacacttcccaagaaatggctgaacaatgtagccaatgtaaccttcgggcttgtaggacgcaacctgtggatgatctattgcaaagcaccgtttgaccctgaattgtctgcttctacatccagtaactactatatgaatgtggactacttcatgcaaccaagcatgcgcaatataggatttaatgtaaaagtacaattctaaattaatgagaaaattattatgaagaaatatctaagaaatataacagtcggtactgctttggtattagttgccgggagttgtaccggtaattttgaagaatacaacaccaatcaattccagattcatgaagctgacccttctactttgatgaagtcaatgattgagacgatcgtaaacattcaacagaatgactcgcagatgatggatcagatggtcggtcagttaggaggctatctgacatgtgcgaatgtatggagcggcactaacttcggcacattcaatcaaagtgatgcctggaatgcaggtccctggaatactaatttcgagaaaatatacggtaatttcttccagatacaggaagcaactaatgaaagcgggcactattatgcttttgcacgtatgatacgggccataaccatgctgcgtgttgccgattgttacggtccgatgccctacagtcaagtgaaaaaaggtaacttctatgtagcttatgacacagaagaacaagtctataagaatataatggaagattttgcaagcgctgccaacgtactctataactattacaaagataccaatggtaacgcaccgctcgccagcaacgaccctatattcagcggcaattatgccaactgggcaagactcgcaaattccatgcgactgagggtggctatccgcatcagtacagcatatccggagatggcaaaagaaaatgcggaagctgccgcatctcatgaagccggactgatcgaagcaaataatgacaatgccatgatggattgcggctcgcagacaaacccttaccaattggcagctgtaagctggggtgatttgcgtgtcaatgccaatatcgttgattatatgaacggatacggtgatccgcgtatgtctaaatacttcaaccattcaacattcactggtcacactcaggaatatgtgggcatgcgctccggagaagatggttttgccaaaagtgacgttgcaggttattccataccggccatcacaggaacttcaaagctattggtattctgcgctgctgaaacagcattcctccgtgcggaaggcaaactgaagaactggtctgtcggcaataaatcggctaaagagtactatgaagaaggaatcaaactctccatggaacagtacggcacaacaatgcctgacaattatctgacaaataccgaaaaaccgacagtatcacataataatgatcccagaggccatgcatataccatctccaacaccgttgccgttgcatggaatgacaacaatgaagaagaaaatcttcagcgtatcattactcagaaatggatagccaactatccgttgggactggaagcatgggctgaatatcgccgtaccggttatccggaactctatccttgcatcgacaatctgtctccatcaggagtagacagcaagcgtggtatgcgtcgtctgagattcccttacacggaagtacagaacaaccattccaattatcagcaaggtgtttcgtatctgaaaaatggtggtccggataatgaagccacagatttgtcgtggggaaaaactaattaatataacctcctaactagaattaatatgaaaaagaattatttactatattttttattgttagcgttgagcaccccaatatgggtgagctgtaatgactggacagaatcagaagcaaaagattacttcgaaggtccttcagaagaatactatgcagccctgcgcgcatataaaaagtctgatcatcccaaagctttcggatggttcggcaactggacaggcgaaggcgcttcattagtaaacagcatggcaggaatcccggatagcgtggatgtcgtttccatctgggggaattggtcgaatattacagaagcgcaaaagaaggatctcaagttctgtcaagaagtaaaaggaactcgcttcaccatgtgctttatcatcacttcggtaggtacacagatcactccacaacatatatatgacaattgggagtcaatgggattcgcaagccaacaggaagctgttaatgatttctggggctggccttcggacgagtctgataaagaagccgtcgaagcatctatccgcaaatatgcaaatgctatcgctgatacgatcaacaaatacggctatgacggattcgatatcgactacgaaccaaactatggtaataaaggtaacattgtggacgacgatgacagaatgttcatattcgtagacgaacttggcaaacacttcggtcctaaatcgggaaccggcaagttattgatcattgacggcgaaccgcaaagtataaagaacagacccgatgtaggcccttactttgattactttatcattcaggcctataaacccggtaatgacaacaatctggacaaacgtctgatagacggtggtgtagcaggtccgggactcgttcagacttacggtagcgtaatgtccgaagagcaaatcacaaagatgaccatcatgaccgaaaactttgaggctgtagatgctgctatggatggcggatatccttataccgaccgttatggcaacagcatgaaatctttggaaggaatggcacgctggcaaccgaaaaatggtttccgtaaaggcggagtaggaagctatcatatggaagcagagtatccgacaaatccggaatacaagaatctacgcaaagctatccagattatgaatccttctaccaaaccgttaattaaatattaattcactatgaaacagattaaaaacataagaaacttcttgttgatatcgcttatcgcaggcggtacatggatcggctgtgacgatgcgaattatagtacattggacacgcacgccttcttcgaagaagctttaactgcaacaagcaccaaagtgactgttatgggcagcggtgaaaccaatgtcacactgaacgcgcatatcagcaatacacaacagaaagacaacagctatagtctggcaatagatcaggctgctcttgacgcatacaacaaggctaatggtacaaactacatcgcattgccggaaacccattacacccttccggacaatattacgattaaggcaggtgcttataatgcagatcctatttccatacatatcaaagcattctccgaggaaatgaatgcatccggtgaatcatatgctttacccgtacgcctagtagccaaacaaggtagtattgatgtaatgcctgttaccggcagcttggtgattcttgccaatagtatcatggaattttccgccccgcaatttgtcggaagtacagaactcgtagccaagaaattctctgaagctcctgaaacctacaacgagtttactgtcgaagttcgtttccaggtaagcaatactgccaatcgtaaccgtgcagtattcagcacatccggcagcgacggcaagagcttgttattgcgtttcgaagatccgcaaagcgacaatagtgaccacaaagctcactcattagttcagattcagactcatgaaacctatctgaatccgacctactctttcgaacctaataagtggcaacatcttgctgtgacatacaatggttctaaatatcgtatctatattaacggtaaagacggaggttcaaaagacgttgccggcgggccttgtatatttggtaatatgagttggttcagtggcggtagctggtggagtggatgtaaaatcttggtaagtgaagcccgtatctggtctgtatgccggtcggaaattcagattcagaacaacatgactatcacaagtccaaaatctccgggattagaagcttattggagattcaatgaaggtaaaggtaatgtatttgaagatgctaccggtaaagggcatactattaccacaacagtcactcctgtgtggatagataagattctgtctacagatgaagctactccatggaaataaaatgatggtacaattttaatatagttactatgaataaagtatttcaatcaataatcattacactcatgagtgcaatgatccctttcttctcatcttgcagcgatgatgattcggtcaacgaatgggatatgagctatgtttctttattgccggcagattatttgagaccgactccttcgtttacactaaagcatgtggaagaagaaggtattgaaggcagtgttgagtttcagtttatggctacaacacaaaaagctgttacccaagatataaatgtacactatagtgtcacctgtgatggtatagatgcaaacaaaatcaatctgtctgccaaaaatctgttgataaaagctggttctacagcttcagaaccgattactttgagcatcacagactggaagtatctggaaaataccaaagaagcgcttgagtatactctgaaaataaaaatcgcagatatcgaatcaacatcggcggaagttactaatgcagcatactatcaggaaatagttctgaaaatctctaaaaccgcagaaaagaaaaaggaaagtgtgctactgaccaacgtcaaagactggatattcacctttatgaccggagtagaaaattcggcatcaaactctgtcgcaggaacaggaacgaatgacgttgctacaaatggagtacctttctggttgacagttgacttcaaagaagttaaaaacgtcacaggcgttcaaacaacccattggggagccggatatgctccttcaaaagtggaaatattctcttcggagaatggagatgactgggtatccatcggacaatgggatactaaaggaagaactcagactatcacattcgacgagcgggttaagacacgttacctgaagtatcagatgattactgttcccagccgcgtagatatcacaaggttctatatttatgcatggtaataagcgtatggaataagttttccatcaattaaatatcggacaagagcagacttacaagaaaaatgtataagtttgctcttgtttttatatagagctacaatccacctttagcaaacataaattagataaaatgaaaaaacatcatctattaggagtcattcttttatgcagtggactattttcctgttcttcaggagttattcagcaggcaaactacgaagttattcctctgcctcaggaaatcaaaattacgaccggaaactttgtactaaatgaccgtacttccattgtctatccgaaagataacaaggaaatgcagcaaaatgcaaatctgttggcggaatacattcatcagatgtccggcaaaaagctgaaagtcattgacgagccagtcacttcaaacacaataatcttagcaacaggtctgaatgcagacaatgccgaagcatatcaactaaaagtaacccaagacaacgtaatcatcacaggtacttcagaagcaggaactttttatggcatacagactttgcggaagtcactcccaattacaaacaaaggagacataagccttcctgctgtcgaaatcaacgactatccacgtttctcctatcgcggagtacatttagatgtttcacgccatttcttcccggcagactctgtcaaacgctttattgatatgatggctttacacaatatcaaccgtcttcactggcatctgaccgatgatcagggatggagaattgaaatcaaaaaacgtccggagttgaccactatcggttccaaacgctcggagacagtcatcggacataattccggagaatatgacggcattccctatagcggtttttatacacaagatgaagctagggagattgtaaaatatgcacaggaacgccatatcacagtaataccggaaattgaccttccgggacatatgcaggctgcgcttgctgcttaccccgaattgggttgcacgggcggcccctatgaagtatggaaaatgtggggagtatcagaagacgtactctgtgccggaaatgacaagacactggcatttatagaagatgtcctgaatgaaattgtagatattttcccatccgaatatattcatgtcggcggtgatgaatgcccgaaggtacgttgggagaaatgcccgaaatgtcaggcacgtatcaaggaactgggactaaaagccgataaagatcacacagccgaacaaagacttcagagttatatcattaattatgctgaacagtttcttaacggcaaaggacgtcagatcattggctgggaagaaatactggaaggaggactggcacccaatgccactgtcatgtcatggagaggcatagaaggaggaattgaagcagtgaagcataaacacgacgcaatcatgacacccagttcattcctgtacttcgattactatcagaccatggatacagacaatgaaccgcctgctatcggagggtatgtacctttagaaaaggtatatagctacgaaccggttcctcagatactcactcccgaagaagctaagcatatcgtaggcatacaagccaacttatggacggaatatatccctacttatagtcaggtagaatatatggaactcccccgtatggccgcattatcagaagtacagtggactatgccggagaaaaaagaatatgcggatttcctgaaacgattgcccggactgatcgctgtctatgacatcaatcaatataactatgccaaacatatcttccaggtaaagtcccaatatatccctgataccgaagccaacgtattgaatgttgtcttatctactattgataatactccggtctactatacatttgatggcagtgaacctacagccagttccaatatatacacggacacactgaaaatcggccaaagctgcacactgaaagcaatcactatccgtcccaacggcagtagtgcagtgttgaaagaggatatcaaattcaacaaagccaccatgcagccgatcaccatgcagcagcccattaatgaaaagtataaattcgaaggaaagaatacactcattgacggactggcaggaagcagaaattaccgtaccggacgatggattgccttctatcagaacgaccttgaagcagtgattgacctgcaacaggagattccgataagcaaagcatgggtacgcacctacgtagaaataggagaagaaattcttgatttacgcgaactttccgtagccgtatcaaacgatggaaaagagtacaaagaagtaaaatctgaagtttaccccgccgtcagtaaggaagataagaatggcatctatacccatgaactttctttcgatacagtgcaggcacgttatgtgaaaataacagcccgtccggaatataacataccggcatggcattggggtaaaggaagaccggcatttatattcgtagatgaaatagggctggaataaaacttaaaaaggtatgtcgctgggcgacatacctttttttaacattctctttatcctctttattttttagacaatcgaataatccgtccttccttcttatagctgaagtgatttgtatgcatcaatacattcaatatttcgtccggaagattatcagtagagaattcaccggtaaaccgttcggtcttcagactttcgtcatcatacacaaacttcaagtcatatagtttctccataatatttgtaatctccagcaatgaatgttgcttgaatttcagttttccgttaatccacagaagaacttcggtcggctcggcatattctattaattcagcctgataggtcgttgtattaatgttcaacgtttgtcccggtttcagcagatagccattattgacggttcgcggagattccatccgcacagaaccttgcaacagagtggttactaccctgtcctcttcttcacgtgcccgtacattaaactttgtacccaatacgcaagtcttaatccttaattccgcaacactattataaattaaactttttaagtacctgagcaacaaaaagttgctcaggattttgccatgtcagaattttcacttatcttagtgttgcaaaaaaaacaagagaatccgacgatagacatggcgaagatacaaattaaatctgagagactcactccttttgggggattattttcaatcatggagcaatttgactccacattatcatctgtaatcgactcaaccctcggtctaaggtgtagatcgttcggttatcagtacagcgaaatcatccgttctctcatgagtatctacttctgtagcggttcatgtattgaggatgtcactactcatttgatgaaccacctctcgcttcatccgacacttcgcacttgtagctctgatactatcctcagggcgataaaggagttgacgcaagaaaacatttcatacacatcagatatgggcaagacctacgatttcaatacggctgacactctcaatactttattgctcaattgtatatttgcatctggccaactgaaagagggtgagatgtatgatgttgatttcgaccatcagttcatagagacagagaagtatgatgcaaagcctacatacaagaagttccttggttatcgccctggcgtggcggttattggcgatttgatagtcggtatagagaatagcgatggtaacacaaatgttcgtttccatcagaaggacacgctgaagaggttctttgcgagatttgaacagaatgggctcactatcaatcgcttcagagctgattgtggatcatgttccgaggaaatcgtggaggaaatagaaaaacactgcaagtccttctatatccgtgctaaccgctgcagttcgatctacaatgacacctttgctctcaaaggctggaaaactgaggaaatcaatggcattgagtttgaattgaactctatccttgttgagaagtggaaaggtaaggcatatcgacttgtgattcaaagacagaaacggatggatggtgtgcaggatttttgggaaggagaatacacataccgttgtatcctgactaacgactatgattcttccgtaagagaaattgtcgagttctataaccttcgtggaggaaaggaacgtatcttcgatgatatgaacaatggtttcgggtgggacagattgcccaaatccttcatggcagagaacacagtgttccttcttcttacagcacttatccgtaacttttacaaggccattattcaaagacttgacgtaaagaagttcgggctcaatgcaacaagtcgcataaaagcgtttgtcttcaggtttatctctgtaccagccaagtggatcaggacatcaaggcggtatgtgctgaacatctatacctgtaataatgcttacgcagatgttttccagactgattttggataatgcctacaacttatgggaatgatattgtgtattgcctcaagtcacattgtggggtaaggggatattgtaggcagaagtgggtgcttcaagttcaaattatctgcaaattcagtaatgagaggacgtgtaaacgcaataaggacgttcaagggcttagttgcggatttgaggttaatatgcttcgtatttacgatgaatggagcatgcttgtcacgggccacttcaaagtaagcctcgcccgacaaatcaatctgacgatccgtactccagaaagagttacggtaaataagcttcgtagatgcattcagccaaaccttactaccgtccggaagcactgtttgcgctctctgtccaccggtagtcatcactgtataatcagaaagtttattggaaagcaatccccacgcaattccgcctgcgaaaacaagtcctgcgagaaaagcggctgccgtggacgcataacgtccccatcgaaccgatatacttcttcgcttggcttttttctccttttcacgtacgagcgacttaaacttcgtcagtgacgcttctgtgtctacagcatccatcactgccatacggtcgcctacaaaaagggtataatatagctgctctagtatttgtcggttttccggtgcttcttcacaccatagttctacctgctgacattcttcgtcattgcatcctcccctcaggtagttcatcaagatagattcatccatgttcaatcatccttttactataaaaaaatataatacctctgttattaatacagttggcagcgcaaatatactaaactaaaaaagaaaaaaaccttaattccgcaacactattataaattaaactttttaagtacctgagcaacaaaaagttgctcaggattttgccatgtcagaattttcacttatcttagtgttgcaaaaaaaacaagagaatccgacgatagacatggcgaagatacaaattaaatctgagagactcactccttttgggggattattttcaatcatggagcaatttgactccacattatcatctgtaatcgactcaaccctcggtctaaggtgtagatcgttcggttatcagtacagcgaaatcatccgttctctcatgagtatctacttctgtagcggttcatgtattgaggatgtcactactcatttgatgaaccacctctcgcttcatccgacacttcgcacttgtagctctgatactatcctcagggcgataaaggagttgacgcaagaaaacatttcatacacatcagatatgggcaagacctacgatttcaatacggctgacactctcaatactttattgctcaattgtatatttgcatctggccaactgaaagagggtgagatgtatgatgttgatttcgaccatcagttcatagagacagagaagtatgatgcaaagcctacatacaagaagttccttggttatcgccctggcgtggcggttattggcgatttgatagtcggtatagagaatagcgatggtaacacaaatgttcgtttccatcagaaggacacgctgaagaggttctttgcgagatttgaacagaatgggctcactatcaatcgcttcagagctgattgtggatcatgttccgaggaaatcgtggaggaaatagaaaaacactgcaagtccttctatatccgtgctaaccgctgcagttcgatctacaatgacacctttgctctcaaaggctggaaaactgaggaaatcaatggcattgagtttgaattgaactctatccttgttgagaagtggaaaggtaaggcatatcgacttgtgattcaaagacagaaacggatggatggtgtgcaggatttttgggaaggagaatacacataccgttgtatcctgactaacgactatgattcttccgtaagagaaattgtcgagttctataaccttcgtggaggaaaggaacgtatcttcgatgatatgaacaatggtttcgggtgggacagattgcccaaatccttcatggcagagaacacagtgttccttcttcttacagcacttatccgtaacttttacaaggccattattcaaagacttgacgtaaagaagttcgggctcaatgcaacaagtcgcataaaagcgtttgtcttcaggtttatctctgtaccagccaagtggatcaggacatcaaggcggtatgtgctgaacatctatacctgtaataatgcttacgcagatgttttccagactgattttggataatgcctacaacttatgggaatgatattgtgtattgcctcaagtcacattgtggggtaaggggatattgtaggcagaagtgggtgcttcaagttcaaattatctgcaaattcagtaatgagaggacgtgtaaacgcaataaggacgttcaagggcttagttgcggatttgaggaaaaatattttctcccgttttatttcgtttctttcattgctttcattatttttgctctgcataaaaaataatgaagaatgcaacaacctcctatatacctagatattaacaataataaatctatcatcaatgccttgaaagcaggcgaagaatatgtattcgacgctgtctacagacattatttccgtagattgtgcgccttttgttcgcaatatgtcagcgagcaggaggagattgaggagattgtacaggacacgatgatgtggttatgggaaaaccgctgtagtcttatggaagagcttacattgaaaacgcttctctttactattgtcaaaaacaaagctctgaaccgtatttcccatttcgagatcagacgaaaagtacatcaggagattacagaaaaattcgagaaagaattcgacaatcctgacttttatctggaaaatgagttgttccgcctttatgagaatgctctgaaacagcttcccaaagattatcgggaagcatacgaaatgaatcgtaatcaccggatgacccataaagaaattgcagaaaagctgaacgtctctccccaaaccgttaactatcgtatcggacaggctttaaagctattacgcattgccctaaaagactatttgcctttatttattctttatttcgggcttgacatattcaaacaatcatgaaacaattcatatcaaaagcatgagtgaactcctagtctataaagcctcggcaggttcaggcaaaacctttacccttgcagtggaatacataaagttgctgatactaaatccacgtgcctatcggcagattctcgctgttacctttaccaataaggcaacagcagaaatgaaagaacgtattctcagtcagctatacggcattcagatcggtgacaaagattccgaggcctacctgaaccgcatcaaagaagaaacaaagaggacagaacaggaaatacgggaagccgcaggaatcgccctcggatatatgctgcacgactacagtcgtttccgtgtagaaaccatcgattcttttttccagtccgtcatgcgcaatctggctcgtgagctggaactcagtccgaatctgaatatcgaactgaacaatgcggaagtactcagtgatgcggtggacagcatgattgagaaactgggtcccacctctcctgtcctcgcatggctgttagactacatcaacgaacgaatagctgatgacaaacgctggaatgtatcggatgaagtcaaaaatttcgggcgcaacatcttcgacgaaggatatatagaaaaaggtgaaggtctccgccagcgcctccgcaatccggataccatcaaagaataccgcaagcagctgaaagcattggaaacagaaatcctggagcaaatgaaaggattctatgaccagtttgaaggagaactggaaggacacgcccttaccgcagatgaactaaaaaacggttcacgaggaatcggcagctatttccgtaagctgaacaatggcattctaagtaatgacatccgcaatgccactgtagagaaatgcctggaagatgccaaacactgggctaccaaaacatctccacggtttgccgatattattgatcttgcgaaatccagcctgatgcagatactggaggatgcggagaagctgcgttctaaaaacaatctcctgctaaatagttgccggctttccctgcagcatctcaacaaggtacagcttctcgccaatatcgacgaagaagtgcgacagctgaaccatgacaacaaccggttccttttatcagataccaatgccctgctccatcaactggttaaggacggagattcctctttcgtgttcgaaaagataggaaccaacatccgcaatgtcatgatcgacgagtttcaagacaccagccggatgcaatggggaaatttcaaactgctcctgctcgaagggctttcacaaggagcagacagcctgatagtaggagacgtcaaacagtccatctaccgctggcgaaacggtgactggggaatccttaacggtctgaacgaccgcatcgagcatttccccatcaaggtaaagaccttagccaccaaccggagaagtgagaccaatgtcatccggttcaacaaccaaatattcactgctgccgtaaattacctgaacgaagtatacaaaaaacagttgggtaaagattgcgatgatcttcagaaagcctatgccgatgtggtacaggaatctccgcgaagtgtacagaaaggatatgtcaaagccactttcctggaaccggacgaagcgcatgactatacagaccagacgctgataagtctcggtgaagaagtagagcatctgctttcttccggtgtacggctgaatgacatagctatccttgtacgcaagaacaaaagtattccccgcatcgcggactacttcgacaaagagttacattataaaattgtatcagacgaagccttccgcctcgatgcctctcttgccatctgcatgatgatagacgcactgcgatttctatccgacgagagcaataaaattgcacgggcccaactggcaatagcctatcagaacgaagttctgcaaaagaatctggactggaacacccttctgctccttccgatagaaaactatctgccgcccgcatttcttgaaaagcagaaagaactccgtctcatgcctctctacgaattgctggaagaactattcagcatcttcaaaatgagtcacattgaagaacaggatgcctatctgtttgccttcttcgatgccgtaacggattatttgcaaagtaactcctcggagctcgacggttttatccgctactgggatgagacgctgtgcagcaaaaccattcccagcggtgaagtggaaggtatccgaatcttctccatccacaaatccaaaggattggaatttcatacagtactccttcccttctgcgactggaaactggagaatgaaacgaataaccaactggtatggtgtgcccctcaggaagctccgttcaatgccatggatatccttcccatcaattactcgacacaaatggccgaatctatctatgggaacgattatctgctggaacgtcttcaactgtgggtagacaatctcaacctgctttatgtagccttcacccgtgccggaaagaatctgatcatctggagcaagaaaggacaaaaaggaaccatgtccgaactgttggccaatacactgcctgtagttgccctcaaagaaggcctcgactgggaggaagattgctatgaacaaggagaactctgtccttcggaagaagaaaaagcaaaaacttcgaccaataaactgactcagaagccggataagttgcctgtccacatggagtccatgcgtcatgagattgaattccgtcaatccaaccgctccgccgatttcattcaggggatcgaggaagaagaatcggatgaccgtttcattcatcgcggacgtatgttgcacacgctattttctgccatagaaacagcagaagatattgatccggctattgagcgcctcattttcgaaggggtcatcgccagcagcgaaaaggccgaagaaatacgggaagtagcccgaaaagcattctcctccccggagattcagaactggtattcgggtgaatggactctgtttaacgaatgtgccatcatttacaaagaaaaaggggtgttgcaaacccgacgtcccgaccgtgtaatgatgaaagacggtcaagtagttgtagttgacttcaaattcggtaaagagaacctccaatataacaaacaggtaaaaggatatatgcaactgcttactaagatgggatataaaaatatcaccggctacctgtggtacgtagatgaagagctaattgtaaaagtgaaataatgaaagccgcaccgctcataggaattagccgccatcggctcagtactgatggagagggagtcactactctggtggctttccatggttgcccgctgcgctgcaaatattgcctcaatccgcaatctctgcactcagaaggtatatggaagaactatgactgcgagcagctttatgaggaagtccgacaggatgaattatactttctagccactaacggaggcattacattcggaggcggagaaccttgtttacagagcgatttcatttatgaattccgtcaactctgtggacaggaatggcagctttccgtagaaacgtcactcaatgtaacgcaagagaatatagagaaactagtacctgttgtcgattcttatatcatcgatatcaaagacattaataataccatataccagaagtacaccggaaaaaataatgaaaaagtcctgcataatcttcaatatttgattgagcacggaaaaaacgaacaaatcattgtccgtacccccgtcattcccgcatacaatacagagaacgacgtcgataatagcatccgtttactgaaagaaatgggaatcatccaattcgatcggtttacttataaaacacctaacaattgtcagccatgaaacgaggaaaacaaacctgcaagatattaaaggatatccgcagacaaatagcagaagctaatgatattgagttcattacttccgagtgtcaatatcagggtgattgtctgggcacttgtcccaagtgcgaagccgaagtacgttatctggaacaacagttggaacgtaaacggatggctggaaaagccataactatattggggatatctgccggactggtagcaatggcaccgatgacttcatgtagtagttctcctaataaaggaactaaccaggaaactatcagtgactctaccaatgctagtgtaatgtttggagaaatatgcccgactcctgtagaagatactatacctatggtagagaaagatacagtaaacaaacaagaattacctgaactaccccaagagatgggattaattgagattactcctatatcaggtgatataataacggtaaaagactcgctttctgaaaaagattcgcttaccgatgtattagaagtggctgctgtcatgcctgaatttccgggaggagcacgagaactaatgaaattcattagtgcaaacataagatacccctcaatgtcccagggaggtgtatgtcaaggccgcgccattgtacaatttatcgtagataaagaaggaaatatagttcaacccaaagttgtacgtggtgtagatccttatctggataaagaagcattacgtgtcgtcggtcttatgcctaaatggaaaccgggagaactggatgacggaacgaaagtagccgtccgctttacgattcctgtaatgttcaggctgcaataaacaaatatctaagatagaaaaaacttataattgatatgcaatcatttctccaactagtcgctcacgatttatatgccaagataggaaacgatctgtctcgtacagtactcgtcttccctaacaagcgtgccaacttattcttcaacgaacatctggcaggagaatccgaccaaccgatctggtctcctgccgcaatgagtatcagcgacctgttcaggaagttatctgtacagaaagcgggtgaccctatccggttggtctgcgaactatataaagtattccgtgaagaaacagaaagccaggaaacactggacgacttctatttttggggcgagctgctgatcagcgatttcgacgatgtagataaaaacctggtagatgcggataagctcttcagtaacttgcaggacctgaagaatctgatggacgattatgaattccttgataaagagcaggaagaagcgattcaacagttcttccaaaacttctctatcgagcgtcgtaccgtactcaaagagaagtttatctccctttgggacaaactgggtactatctaccaccgctaccgtgagaacttagcggaactcggaatagcctatgaaggaatgttatatcgcaatgtaatcgagcaactcgataccacccgactgaaatacgacaaatatatttttgtcggcttcaacgtgctcaacaaagtagagaccaagttctttcagctattacaagatgcggataaagccatgttctactgggattacgatctcttttataccaagcaaatagtcaaacacgaagccggagaattcatcaaccgtaatctgaaactattcccgaatgaattgcccgaaagttgtttcgacactctgcggaagccgaagaacatacgctatatctccgcttctaccgagaacgcgcaagcccgctttcttccggaatgggtacaaagtactctttccactgccaacgaagaaaaagagaacgccgtagtcctctgcaacgaagccctgctgcttcccgtactccactccatcccgcaagaagtgaagaacgtcaacatcacgatgggtttcccgcttgcacaaactccggtatacagctttattaatgccgctatggaattacaaacgaacggctaccgtaccgctaccggacgtttcacctacgaaaccgtatccgctatactgaagcacccatatacccgtcagctatccatcaacgctgaacctctggaacgggaactgaccaagactaaccgcttctacccgctcccttcggaactgaaaatggatgatttcctgatcaaacttttcactccccgaagcggcatcaaggagctatgcgactacctgacagaattaatcaaagacatctcccttctctatcgggaagaaagcgagtacaacgatatcttcaatcagctataccgggaatccctcttcaagagctataccaccatcaaccgtctctatagcctgatagaaaccggagagctgaatgtacgcaccgacacactaagacgcctggtcagcaaagtgctgaccgcctccaacattcctttccacggtgaacctgccattggtatgcaagtcatgggagtactggaaacccgtaaccttgactttcgcaatatcatccttctctctctcaacgaaggacaattgcctaaatcaggaggtgattcttcctttattccctataacctccggaaagctttcggtatgaccaccatcgaacacaaaaatgcggtctatgcctattatttctaccgactgatacaacgggcggaaaacatcaccttgctttacaacacttcttccaatgggctgaaccgtggagaagaatcccgtttcatgttacaattgcttgtagaagggcctcacaagattacccgcgaatatcttgaagccggacaatctcctcaaggtacaacagatatcagcatagagaaaactccggaagtattcgaacgactgcgctgttcttatgattgttcgaatccccaatcgtatatactttctccttcagccctcaacgcctatctcgattgccggctgaaattctattaccgttatgtagccagactaaaagcaccggacgaagtcagtgcggaaatcgactccgcattgttcggaaccatcttccacctctctgcccaattagcttatacagacttgaccgctaacaggaaaataatacaaaaagaagatttggaacgcttgctgcgcaacgaagtcaaactacaaaactatgttgacctcgctttcaagcaagagcttttcaaggttccggcagacgaaaagcccgaatataatggcgtacaactcatcaactccaaagtaatcgtctcctatctgaaacaactgctgaggaatgacctgcaatacgcccccttcgaaatggtcgccatggaaaaacctgttgccgaaaagataacgattcagaccggacaaggtccgatcaccctccgattgggaggaaccatcgaccgtatggatgccaaagacaccaccctgcgcatcgtagactataaaaccggaggaagtcccaagacacctgccaacatcgagcaactgtttactccgtcagaaacgcgccccaactatatcttccagactttcctgtatgctgccattatgagccggcagcagtctctgaaagtagctccttctcttctctacatccatcgggcagcctctgaaagctattcgcccgtcattgaaatgggagagccacgccaaccgaagattccggtcaacaactttgccttttttgaagatgaattccgagaacgtctgcaaagactattaaaagaaatattcgatgagaatgggcctttcacacagacagaagatacaaagaaatgtgcttattgtgattttaaagccatttgtaaacgataaaatgctgaaagaataatttataactatcaaacaaaacctgtcctgttattctgagctgtcactacttctctaaagtaatgtgcttagaaaacaggacaggtttttatcttatatcgaacttatattagctttccaacaacggaatcgagaaactgaacgtagaaccttctcctttcttcgaagtgaaccagagctcacctccgttcttagtaacaaagtccttacagagcagcagtccgagtcccgaaccttcttcattatttgtaccgaaagtactgaaatgcgtatcggtatgcaacaatttcttctgattttcttcatcaataccacacccgctatccttcacgctaactatcgccatgctatcttcttctctcagtgataccaagacttccgatccctcgttactgaacttgattgcattacttatcaagttacggataaccgtcttaatcatatcaatatccgcacgtacttccatacgatcttcaggtatttccacagcaatgtggatattcttcagcccggctaccattgtaaagatctcgctcactccttccactacttctaccatatcgatattctggtaaacaactttcagcttaccaatctgactcttcgtccacttcaataagttgtcgagtaaggaaaatacatcctctgttgtctgattggccattgtcagcagttcatacatttcagagccgatagtttcactcggtaagttcagaatcagcatattgagcaccatcttaatagagcccataggcgaacgcaggtcgtgtgcaatcacagagtagagtttatcacgtcctatgatagtcttgcgcaactcttctgtttgtgctatgataattcgtttggctgccaccaacgagatctgatgcgttacacgaataatcagttcctctttattaaacggtttggaaataaaatcgttaccgcccacctgaaatcctttcacgatatccgccgtactattcaaagcagtaagaaagatcactggaatttcgctcatttcttcatcggccttcatttgctgggctacttcgaaaccgctgatatccggcatcatcacatccagcaacacaagatcaggtttttctttcttcacctgctccaaagcctgagttccattgcctgctgttacaatattgaacttctcattggtcagaagcaccttcagcagaaggacatttgaaattacgtcgtccacaataaggaccttatattcggaaggattaatttccacattcatatcattctattttttatgttacatcagacatttttaaaatactcaatcatacgcttcagcccatcttccagctcgacggtaggctgccatcccagtttctcttttgccagttttatatccggctgacgctgtttcggatcatcggtcggcagaggtttaaaaactatcttcgaagtagagccagtcatccggatcactctttccgccaattcaagaaccggaaactcattcggatttccaatatttatcggacccgtaaagtcatcctccgtatccatcatccgcaccattccttctatcaggtcatcgatatactgaaaactgcgtgtctgtttcccatcaccatatatcgtgatatcttcattattcagcgcctgtatgataaagtttgagaccacacgaccatcattaggaagcattctcggaccataagtattaaagatacgaatgatcttgatgcgagtctgattctggcggtagtaatccataaacaaggtttcagcacatctctttccttcatcataacatgagcgataacctaccggattcacatttccccaatagctttccggctgaggatgaataattggatcaccatacacttcgctagtggaggcttgcagtattttggcatccagtctcatcgccagtccgagcatattgatagcccccatcacagatgttttggcagtttgaatcggatcatgttggtaatgaatgggtgacgccggacaagccagattgtaaatttcatccacttcggcagaataaggataagtaacgtcgtgtcttacaacttcaaaatgatggtttcccatcaaatgctttatattgtccttagaacctgtaaagaagttatccaaacatataacgtcgtgtccttcatttacaagtcgagtacaaagatgcgagcctataaatccagccccgccacttaccaatattcttttcatcttctaattttaactattgtttttcagagaagagaacttccccgtcttgtttatagaggcaaatgtaaacgatttgctcataatatacaattttaaaggtggatattttttaagaaaagcaaaaataaaatagtttcagtttccgaaacaactttcctgtgtcaagtgttattaatagaaacaaaccactaattcaataggattatgataatgaatgaacttaatacaaacctgatagaagcggccaaagaaaagttccctgcaaaaggacaattggcaaatatattaatggataccctttatatgggcaaggaagctatctaccggaggctgcgtggcgaagtcccctttacatttcaggaagcagccattatttcaaaagaactggggatatccctggacagaattgccggagttagcttcagcaacaatgcaatgttcgatatcaatgtagtagatcatggcaaccccttcgaaacttactatgatttcctcaacaagcacgtcaagttattccatacgctgcgggaagatccgaatgcctcattaggtacagcctccaatgtaattccgcagacactatatctgaagcacgaacttctggccaagttccgtttcttcaagtggatgtatcagaatgaacatattaagtgcaaacatttcgaagaactggagattcctcaaaagataatcaatgtccagcaagattttgcgaaactttcgcatcatattcattctaccgattacatttgggacagcatggtttttcttcatcttatcaatgatatacagtatttttccgacatacatctcatttcagacgaaatgaagcaaaatctgaaagaagaattgctgatacttacagatgagttggaaaggcttgctataaaaggaaagacagactttggtaatgatgtgcatatttatgtgtcacaaatcaacttcgaggcgacttacagttatctcgagacaagtacactacaacttagtctgatacgtgtttattccattaattcactcactacacaggacgttcagatgtttcaaagtctgaaagaatggattcagtcattaaagaaattctctacactcatctcagaaagtggtgagatgcaacgcatccaattctttaatcaacagcgcgaaatcattgatgctctatagagttcttcctaatttcgataatcgaaactaactgaattttataattccaaatcatgaaagtagacaagcttattgcctacttttttccattatacgttctttttctatctctattctatcaaatgagaaaaagctcttactcttcagaactgttttcccacacaaaactctcgtttacatgccgtaattttgcatagaatgtatcacataaagtattaacgtatataaaagagaacaaacaatgaaaaatggtattgtaaacgagttgattactgcaatgaaagaacggatccccaaaggacaaaatcttgccaattctctggcagacatcttgtatatgggtaaagaagccgtctatcgcagactacggggtgaagtagcttttactatcgacgaagtagcccttctgtctaaaaaactggggatttctattgatcagattataggtaaccacctttccaatagagttacttttgatatgaacctgctgcattcgcccaacactttagaaagttattatgagattatcagccgttatcagcagatattcgattatgtgaaaggagacgatacgacggaagtatatacagcttccaatcttcttcccttcacactttattcatcttacgaatacatgtctaagttccgcctttgccgatggatttatcagaacgggcaaatgaaaacaccgaactcactggcagagatgcaggtagaagacagaatcgtgaaagcacataataagctgagtgaaagtgtaaagcaatgtcggaagacctattttatctgggatagcaacatctttctttcctttgtcaaagagatcaagtatttcgcaagtctgaatctgattacggaagacgacgtggcacacctgaaagatgaactctaccaattgctttcagtcatggagacactatctgttaagggagaattcagtgaggggcgaaaagtctctttctatctctcaaacattgatttcgaagcgacttacacctacatagagaaacaagactaccaagtcagtttgctccgggtgtattccatcaattcgatggattcgcaaagtccgcaaatctgtcagatacagcggaactggattcaatcattgaaacgacattccacactaatttcagaaagtggagaagcccagcgtatcgagttcctgcaaaagcaacgtacagtgattgatactctctaaagtacaaacagcccggatcattatcgacccgggctgttctcccttcaggatattactatttatcctgtcccactaataatagttccccactattcttagatcattctattgattctcttcctgaatgcgatgcacccatccattgacaacaatctgtacagcaagccatgattcagacaagaaaaagattatatgatagttgctctgtcgatccagatattcttgtgtgctcagatttttaccctccgcattggtcatagcaagataatcaatcagatttatatcgaacactctctttccggatgctttttcagtaagcaccaaacgagttttccggtcttccatcagtctcattgtattcatgtctacataggcagtcgcaggatccttctgttccatatagtaaggtcggaaactcaacacatcatcatccagtaatgaattatcatgtcccagatgtccattagattctataatctcatagtcatagtcattcatatccagtgtccagctgcctgtataagactggaagccaaatcgtacgatttttgtatctctgatcagatttatcgtctcagtctggtggacggtcccatcgaagttgacattgatgacttcaccataccagagcgtttccatccttttattgatgatgagagaggcttcacgttttagtttcaattttaaatccgtaagagtagagacaccaggtgtcaatgaagtgatatcatatgaatcacgtgcaccggcccatgccataaactgatattgtccgacaggaagttcaacttccatcagataattgccggtagacaatgcacttccctcttcagcttgtttaaacagatatttcccattcttatcaaatacataaagttctactttatctacctgagcatgaaacgcatccgcaaactccatgttatagtcatacttgaacttcactgacaagcggcattccggcaggtcttcattaaagctgtcgcatgaagctactatcccggaactcatcaacagaatacctaaggcaacgtaacatataaggctttttagattcatattttcctttttttcaattatatatagaggaaaagaaataatctcttttctcgttatttcctaattcagaggatagaatactttattgattccatcaaaagtaatatcccgaaattttaaaaagttttcggcaactttgaaaatattgggagtaaagttgtgggagagtttctcccacaacttttatttgaaaaatctatttctattactaattccgaattacataatttcctcttgagtataccaagtccaaggattaggtataatttcaatagacaaccagccttcgtcactctcatccggcgttccttcgtccggatccggaatagccggatatcctggattgttaaacttcttaacattgatatcgtaaacagagttacgaacaactccaaattcacctaattcatttgttacagcactggtatcatcatgtttgatcataattttgtagtaacttacagcacctacataataagtaagacctgttacagttatagctctgtctttagctgcaacatttcctacattagcttttgttgctttaaaatcgtcaacaagactggtaatagctgcagcatcagctgtagcaggaaggctaatttcacctacaccaacagcagctaaatatctattatacgcagtagtacgagcagtcgggaaggtagtaggctctttatcagcatatttagctttcaattctgcctcaatccactccattaatgtagcaaaagtatagaagccaccattgattaacatccagtcaccgacaagtttcggatctgtttcctgagctgtagatggagtaccatcatttggcgcaggtctgccatattcagacggaatgaatttagccttcaacagtacatgtgtagtataagcatgtacattatgagttgcagtctgcgtattttcaagacaatattcagcaactttattcaccgtagttgtaggatcattccaaattgaaggagctgaagtactggtataagcattatagttagccaaagcttgagtactatagttagggtcaactctgtatgaaccgatcttatactggtcaaacggagtaatacatgtaccacgagcacctaaaggtttattagcaggagtctcattccaagtcaacgttctcttagatacagggaagaatgtcttgttagtagcattcaacacccatcccgcatccgaaatagttgcctttgcatcagaatcagcagtaacatatacacgaacttttgatacaacacggtcaattctgatagatattggattattagtagctgctgtctcagttgcataaagagccaaatcgacaggagcaccaaatgttcctgaagcttcatcttcatctgaaggttctaacgaacctttggcgttagacatcataaatttaccagcagttgtcatagaagccgaagtatcgtcaagagctgcatttactgttgcataagtcgttccaacaggccatttttgatctgtctcactagcagtctttgcttcaaatttaggagatggattcgcaataatcaatattcgtttagaagttgcagggactttaaaagccttacctgcagccccactaggaataccattggcatcaagaccagcttcgtcattatccaatgtcaagtcagcagttacagttgcagcatcctcattcgcatttgccgtaaagaatatggcacgcactgtagtgatttttgattcgtcctctgttgcagcttcctgattcgggttatgcaatccacgagtttgtaccggagtctttacagctaatgccacccatgcgtctcctgtcgggtctgtcaccaattgattatcatcacctggattcccagtcggcactaaatcttcgttactacaagcagcaaaagccacagcagcaaaagctaacataagaaaattcttctttttcattgtttttacaaattaataaaagcgtttgtaactagtttatttatctctattttctttttttcttttctatttcagctgcattcgtttttttcttagccagttcctccaaattctgtccggcagcttgcagacccgatttggctgcggctttcaaatattcttccgcatgttcatactctccttttaataacattaatacacccatagcattgctatactcaggcagctgcttattgacatttaccatattcagatagcgttccgcagataccaagtcattacgcgaaagagcagcagcggcagcattaatactggcgatctcatccttcggatacatccggaccgcagtctcgaacacatcgatgaattcctgagaacccttcggatagctgttggcaaccataaacatttcattcaggctcagattctgaggacgtgtctttatgatctctttcgcttcgtccagattaaagttcttaatctcataattcaccttacaaatagccacacgaagacttgggaatatatatttcaacatatatcgataaggtactccgccacgaagctgcatcaacttagcttccctacctttttcaacagggatatcattgataatattcagcgcttcatctttatattcaaaatcaatcgtatccagcgccttcaccagtccatcccagttttcaccaccaaagatgatataatactgatttctcgagaaatcgtatctggatgccagataatcacgtagcgccatcgcacgtccttcggacagacgtttgttatttgccaatgatccttcaggtgaagcatagcctacaatatccaatttgtttaccttgatactaggatcagacttcaattcatcaatcatcgcacggatcttagccagctccttcgggttattcatatattccggacgaatattaatcttgttcacctcgaagtcgaggaaacattccgcctgtatatcacggctcttcacttcttccgctttaggctgcaaataggcaaagaaaggtgttaccacgtaaggtactaatatacgttccagttcaatatccccaagtggttccacatccatcagctgaatttcgccgcagccgcattcgtcgcgctgtacgtccacccgggcatcgtccatccacgattcgtaaggcaatatatatctgtatcgaatcgtatcatttcttttcttgctacccttttccaccacataaggtttttcgtagctatccttctccttcgcactcatcaatgaaagccagcgttcatacgccaggtattcattatgtcccttgatggatactttcggaagattgtaaatatgtgcaggagcaaccagttgcggaataaaatccactccgtgtgccgatttgacctttacatcctccagaacgaagtcaatatttatataaaccgatttaccgcgctgttccaactgtaccggtactacagagataaccccgtcataagagcgtgtctgggcaactgccggatttatattctgacataagatagccaatacacacacgatgaattgtatacttctgttcatcattctattctactttatttaattacgtaaataagtgacacactcgctttggtgggaccgaaatagtttttactgctgtctttcagtttggtaccacacgccctgcacggatatttgtcatatacaatatgtgcataccccactcctaccgatgcttcgatgctccagcgtttcttcagaatccatgaatgaccgacggaaacacccccgccatacagatatccctgatagcggctattctgcatattctcactaataaacgaccagtccgggaacccaccgacattgaagtctgcataatgtccatgcactccgatgaacgtacgtctgaacctctcacaaaaccagtagcggacttccggctgtattccccaatggcgcagacgtcttccgttgtccggcttccagggattatagttcaccggaacgtccagagtccacttacgtgccagtccgaattccagcccgagattcatggtagtcgtagcgtcatatagaaggttgcttttaagcgcaactttctgagctttactctcgataaaacatccgagcaccaatactatgagtatactaactttcttcatttatcttacgtttattaattacccttttgagtgatatcaattttgatacgcttcaccgtactttcacctgtatataaactaccgggcataattgttgtcagatacacgataccgtttctcgttgttgaagccgtattaggcattattttaatatagatatgcccgtcttccactatgattttatccgtatcatttctgtccaccatcgaagatggcagtaattttatccattccttaggattgtcagtaccatcttccacctccccggtaaggcaatgataatccacctcaccagtcgtcggaaacggataactattggcaggcatgtatttaagtatggtaccgccggcatcaatagccgctcttcgtctgatatgaacctgtttttccaaatttccaagttttaatgttatatatgcattcactttatctcttccctcaaaactctgccccacttcactatacatcagccagctttgtatcaatacactgaccggagtgacacgtggagaagtgcttgctactataggcaattttccgtcagcgggactgcttagcgcaaacgaattatcagcttcggccatattgtcggttattgtacgcgcatccggaaaagccttttcacaatccgttatcactttaaaagcctcataagtactcgcatcatccggagaataagctataaagacagaattactcacacccagataataatcattgttagctataatctcataagaattactgtcgtccactgtaatttcaaaatccagatccgtattcgacggtttagaaagctttgcatccgctacggtatcatacccccgtccatgcactttctttattgtaaaagtatacgcatgattccgatatatattcatatagttcagatccttatctactatcgccattttgtaataatagcttttagtttcataaattccctgaatgatcagatatgtactataagtctgggtattggtttcatagatataaataggactgttttcggtactttgtttattggttatcgtttctgctgacaccaaaggcaacgagcatgaagcatcgtattgataattcgtcaaattaccagcattgcccataatagaagcagggataaggttatgcaactgcccctgtcgcggaacgtttgccacagcagacactccttccagttcaaagttcgatgcttcattaacaaccacaattttggcaaccgcccgaagaagcatcaacgaactcccgtcactcttttctatcttcgttgtattatccaccttatctacttccagcaaataactcatcggtatcgtctcacccacaccgctgaacgggatgcgggcagaagaagtacttgccggctccgtcagcaagttcgtacatgcagtagccagggtagttgttccctcaatcaacttctcagtaagttgtgactcattgaaaacatatcccgtagaagcatttccgtaataaaactgagccatcggattagctaatatcagcaactggtacttacttccatcagtccgcttagttaaaaggacatatcgctttcctgcaaactcgaaggcctgcacagcttctacaaaaatagcccctgtgccactccctctgaacacgagtacccagggagtcatttcgaccgtattttcatcccctagtgccctggtcgaaggcaggcggtatgaattcgcccgtgcaaaaatctcaagccgtaccttgtcttccgaaatatctcccggatcatccggctctcccgtcaacaatgtttcatgctcacaggcggatatcagtaagatgatcaccagaccaaatatcttcattatatatttcatcattttcttcatcttttcacgcaacgtattgataattaacctcctgtatcatcggaattaattgttcggacaaggaatagcgttctgaatacacaatatcattcagattatcataagcagtaatataattcaattggtttattacgggaatataatacggttcattggcaaaaaatacaaaatcatacgtttccggattgactagatgtgtacagctctgaacatctattcctctgatcgaaataaacgtccctttggcagtagtattattagtgaaagtatcatccatacaagataatatagctactaataataaaaggttgaacaacccaatattcactttaaatccctctaatctcattaaacattcgtatttacctgacattggtacttagtcaagccttaatctgtaatcagtcaaaatctcataatgcaaatgtcgggatattgcatgactctgcgaatttcattcatttctcatacagacaatgaaagttatcttatatggctaataaagaggtcgtccgaatggaatattgcgaaatctaaaaataaggagtagtaaaacaggcattttgcactattagaataaaaaaaagacaaaagtttcagcattcgaaacttttagtgtgaattaatataaataaattccataataaaacaagcccccggataatctcatccgagggctatgttatatactatgatacagatgaaaaatcagagtgttttacgttctgtctccgtaggtgccacctcatccgggatactgaactcccggttggcaaacaaatccgccagtcccgaaatctgcttcaaacgcagcagttcatcccgatccattccgatatttttcataatccactggtcggacatgccggctctgtccaattctgctacaatgttacacatcagctcaatattatgcatcccacgggcacggttgtgccggatggtagagctcatacgattggacaaatccttatcgatcaccacaatcggaagcaatccgttctcacgcttataaatccgtttcgatgtcttcaataccgtatatcggtgataaccatctacgaggatataattatcttcctctttattgtaataacatacacaaggcattgtaaaaccgtcttcccagatcgaaagctccagtaacttcatttcgggaggagctacgacattcgggttataatcgttcgctaatactttttctacgggcactgctttcacctcgtagaccggacttttatctacactcatgatactatgattctatattgttccataacttgacttctcttactcatctcctctttggtcggcgagaatcccatgtatttgcaggcatggtcattcttgaggatacagatacacatacgcttgtaagtcggtatttccctaaattccggaatatcgatatcatcctgatattccatgcgcaccggcttcttgtatgtcttatagttgctgttgtccatcacgataatcggcactttggcatcaatcagtttctgaatggtggaatcactcagacagcctcctttggttcgccaaaaatgtacactgacagacagtttacgcagatacccctttcgggcccgttccggcaaggtagagagcaggaagtacataaactccctccaggtgtacccttccggaagtttcaccatctgccatcccatagcgtgcgtgcctccatacataccggtgaagttcacgccattcacccgtcctatcatcttcccccaggtgttagggtcaagcacccggtagagcgccagactctcctgcgcttcattgatgaacgggcttgctacccgttgacgttccagattgactccggcacgataatacaggtcatacagtacattatagtcccactggaattttccgtttgccgtccacacatccgtcgtcttccagtcgaagatgggataggcattatagatgtcatttccgacctttgaagtccatctatacttatgatacatctggaatttgcggctcatatagatacatcgccagcggttaaaactttcctgcgtacggataccgatcagacagcaggtgcgtaccgcatcctttttctgatggagccactgcgcaaaacgcatctggaattcataatcccacatggtcgtattgtaaaaaggaaaatcctccttcttcatggccttcttaggcatggagcgtacccagatatctttcttgttatcctcccagggccgccagaaggactggtacatagatgtacacgtagatacccggaaaggcacgcacacacggtatacatccaggatgtccttgttcgcctccagtatcctgtccacatagtcgatagtcatcttgtattgaatctcatagtccatgtgaaacactcccaaacgtattttcagattattccgcctgatgtagtcgatacacatattcagcagaaccccactatcctttcctcccgagaaagatacataaatattatcaaactcgttaaatattactttcagtcgctcttgtgctaattcatatacattttttgttcctgtgattgttttttttcccataattcatctgttcatttttacatagcgtgtccacttcttgtccatagatgcaaactcgaatttctcaaaagtttcctgatcttgtatcagcgtgacagagttaagcgtccaacccgcaggtataaatgccgtgactacagaagataacagaagcgacaagatctcttttcgtttctcgtccaccgcagctacataataattattaatgacagcctttttcccgcttttctgttcaaccggaataaagcctatcacatctctgttatcaatcgcaatgtaccaaacaaaatcttcgcttgtcttgaacggatagttattatttgcacgtattacatccggatccattactagaggcgccaaaagctgatataaatgtttgtcttttccttttaattgtattacctgtatcatagcattcaaaaatagacagacaaaaataggtaaaatttcctcgtttcagcacaaagcatgcgtaaaaaatttattttttagcaattccccctcttgtttcataattatttccaattctcccaccatctgatgagtgcattaatccaatcgtatttttatgttccgacagccgattactttatacaaagcaatatggtttcttccttgtccctgcaatattttctcaatccttctttccctttccagtaaagtctcttcattattttccacatgaaactttttattatacctatttccattatacttataaaaaacaatccctttttgcttccggaaacggaaacaaagactatttttttcaattgggtatagccgtaacagatcggtaattctcttcacgattctatcaagaaaatttcgttacatcacttgtaccgacctcaatacagatctcaacgatatagcagtacgtatgtatccaactaacgaaacggcaaacctgaatagcatcaattatctgctgaatggtatcccaaaacagactcttcacggctcagcacaccatatctacagttgggaaattgccgtttacgattcagtaaaaaaaaccggaagaaaataaaatcggcgcactatctttgaaccaaagaaaagaaaaagtataactcaaaaagtacaattatgaaaaagttatcaatcttatcaatgttgctattattcattagcatgggaaacattcaggcacaaactgtcaaagaagaatcccgcaaacaaaaaaaagctgaacaagaattactcgaccaaatgtttttcgatgaagctaaacaagctatagaaatgaaaaacttcattttggaagcagatcatgttatgtttaaatatggtaccacagctttcgtttctcccaacacaaattttgtagcggtaaaaggtaataaagctgtggttcaggtagccttcaatattccgatcagcggtcccaacggtctaggcggcattactgtcaacgggaatatatccggatataagcagactaccgacaaaaaaggtaatatatccgtttcgatgaacgtaatgggagtcggaatatcagcacaggtgaacatccgcttgaataaaggaagtaataacgcatcggtagacataagtccgaacttcaattcaaacaacttttcattaacaggaagtttactcccaatggctaaggccaatgtattcaaaggcaattcactctaaggtaaaaaatgtgtgtttagtaaataaacaagttaaaatattttagctgactataggcattaaattaaaaacaactatggtttaacacttaaaagaaagaatatgaaaaagtatctgtttataggattaatggcagtacttgccacttcgtgtgaaaaagatccggatttaagtaagcttgacaataatttcacagtttacaccaattatgacagcaaaactaatttcaatgatttcaaaacttattgtttgcccgatagtattctactgataggacagggaatgaaggcggagtattggaaggatgagaatgcacaagaaattattaagcaggttgctgatgagatggatacccgtggttatacaagggttaaagtgattaagaatgctaacattgggttacagctctctttcacgcgccaaacaacccaaataataggaaccggcggatggtatggaggcggatggtataacggctggtggggacccggttattggggaccatattggaacgactggtattatccgtatcctgtaacttatagttataatacaggaacattgataatggaaatggtaaatttgacagaccatcccgaggatacaagtcagaaagtaaagttaccggtaatctggcattcatacgcaaccggactattatttgagaattccaaatataacatgcaactaacgttggatgcggtcaatcaagcgtttgaccaatctccttatatcaagaaatcctaaaaagcaaaattatgaaaacaataaaatttattccgaagaaaaagtatattctggcattcatgatatcgggcctgttttatttcagtagttatgcacaggatatcagcgatagattgcattttaatgtagactggcagatgaatgctcctctcaatacgaattttgccgataaaatcagtggttggggtatgaacctggaaggaggttatttccttactccacactggagtctgggggctttccttgatttccatacaaatcataaatatgttccgcgtcaaaccataactgaaggtactgcttcgttgactactgaccgacaagagtcggctttccagctaccattcgggcttgccgcttcataccgatttatcagcaatggatgcctgaaaccttatgttggcaccaagataggaaccatgtatgcccaaaatacaacatatctgaacactataagtctgacagataaaccctgggggttctatgtctctccagaaattggagtgaacatttatccgttttcccaaagccgatttggtttccatctggctgcatattatagttatgccaccaacaaaagcgagttgctgaccggttgtcaggatggaaataataatattggattccgcttaggtgtttgtttctgacatgatctagattctctcaaaaagacaagaggaagtacaaaatgttatagttacttttggcgacctcttgtttttttgttaaatttgtaatatataaagtctacgttcaatatgcggcaaaagttcaattatctgtttattggtttgctattctcaggattggcatttttctcatatctgtttctcttgctttattccgacttcaccccgcaacatctggaagtactgatttctttcaagtcatttatcctgatacttgccgcctttaatctagtcggtttcggagtattaatgatccacaactggcaaaagcgaagctttcagtttctggtcaaacgaaaagagcgattgattatcgattgcattctgacggcaattattctgtttttaatgaattatctggtcttgtcaatagtcaaagccatatttgaggttcctgcaccatttactctgaaagggtccgggctgagaatgatagccttagtctggctggtagaaatggtaataaccaaccttactttgactatcaatttttacaggcagctagttcttctgcacgaaagaacggaacaagtcgaagagaattccattaaggcacagtatgcagctttgcaaaatcagctgaatcctcattttctcttcaacagtctcaatacacttatatccgaaatagagtatgctcccaaaaacgcaattctatttacccaacgtttgtctgatgtataccgatatatattacaaagccagcaacagcgtctggttactatagaatccgaactctctttcatcgactcttatatttttcttcataaagtccgtttaggagactgcatccggatagagaatagaatagaagctgataattatgatttgaaactcccctcattaaccctgcagctattggtagaaaatgtcattaagcataatataattaatatggatatgccaatgaatattttgatcgattatgattctgagaatggaagaatattggtaaccaacaaaatcaggataaagcccaatgtggtcagcaccggcatgggattaaagaatctttcagcccgttacctcctgatatgcaatcaggatattaccatagaaaacaatacgaattattttaccgttaaaatcccagtactgaatgaataaaattacagcagtcattattgaagacgaaattccggccgcccgtcggttaaacaatacattaaatgagttacgccccgaatggcaaattacagtattgcccggtagtgtaaagaagagtgtagaatggtttgcggaaaatccccatccggatcttgtttttctcgacatacaattgacagacggcatttcattcacattcatcgaacaggcacaaccagaaagtactatcattttcaccactgcgtatgatgaatatgccattcgggcatttacagtcaacagtatcgattatttacttaagccgattgataacatccgactggaagaagcaattgtaaagttcgaacatctgactaccaaatacctgaatcaggggcaaaagccaattgacttaatggaaattttacaaaacatcacccaaccgggaaagaaataccgtacccgtttcctaatctcaggcgatgacaaactttttaccttacaagtggaagacattgcttatttttattcagaaaataaaataacctttgccgtaaccaagcaaaatagagaatttatcattgacctttctttggacaagcttatggaacaactcgatccggatgtttttttccgaagcaatcggcaaacagtagttagcatcaatgccatcgtaaaggttgagtcatattttctgggaaaagcaatcttacatgtaaagccgccttttaaagataagataattgtcagccgtgacaaaatagctcctttaaaactttggctaaattattaaatttcagcagagttaattctgcatgtctcaatattcatattcccaatcaattgctttttcactcagtaagattaataagaaaagctccgatcccgttaagaaccagagcttttcctaattataaaaatcaaaagaagcggtgcgtacgggactcgaacccgtgaccccatgcgtgacaggcatgtattctaaccaactgaactaacgcaccaaaatttcctttttaattcgcatctctctcgattgcggatgcaaaggtagacatttttttgaaacctacaatagcaagagtatcttttttctgaaaaggtgtgtttattaagaattatcacgtacatttgcaagcattactataaatagaaaatagaatgaaaaatacaccaatcgaacgaaatgtgattgacgaaacgattaatgagtttcaaattgtcgacttttcgaaggctactatccgtgaagtgaaagcgatagcttcaaaggcggaagcagtatcaggcgttgaatttatcaagatggaaatgggtgttccgggacttccggcctctgccgtaggagtaaaagcggaaatcgaagcgctgcaaaacggaattgccagcctgtatcccgatatcaacggattgccggaactcaaaaaagaagcgtccgactttatcaaagcattcatcaatgtagatttaagcccggagggatgcgtacccgttaccggctctatgcagggaacattcgcttcgttccttacttgcagccagtgcgatgaaaagaaagacacgatcctgtttatcgatccgggatttcccgtacagaaacagcagttggtagtgatgggacaaaagtatgagacatttgatgtctacgactaccgcggtgacaagctgaaagaaaagctggaaagctatctgagaaaaggaaatatatcggctattatctactcaaaccccaataacccgagctggatttgcctgaaagacgaagagttgcgcatcatcggcgaacttgccacccaatatgacgtaatcgtactggaagacctggcatactttgcaatggatttccgtcaggatctgagcactccttatcaagctccgttccagccttcggtagctcactacacagataattatgtgttgctgatttccggttccaaagccttcagctatgccggacaacgtatcggcgtgagctgcatttccgataagttgtatcaccgcagctatcccggactgacgaagcgttatggcgggggaacattcggcacggtcttcatccaccgcgtactctatgcactgtcttccggcacaagccactccgcacagtatgcgatggctgccatgctgaaagctgccaatgaaggtcaatacaacttcctcagcgaagtgaaggtatatggtgacagagcgcagaagttaaaagagattttcctccgtcacggattctatctggtatatgacaatgacttgggcgatccgattgccgacggattttacttcaccatcggctatccgggaatgacaagcggcgaacttgccaaagaactgatgtactatggagtgagcgccatttcactggtcaccaccggaagccaccaggaaggattacgcgcgtgtacctcttttattaaagaccaccagtacgcacagctcgacgaaagaatgaagctgtttgccgaacatcacccgattgcctgacagccgaatagcgtatttatgccggaactgatgttcatgtcagatgcggatattcataaaagctgctcttaaaacaaaaaaaatgggaaagtatggctattattccatttcttttcttatattagtggcacgaatatcaatctgatggcatgaatatagactctgacatatttaaaattcaatcgaataatgtattgccatcacgaggaaagattctcatctccgaacctttccttcgtgatgccacattcggcagatctgtagttctgttgatcgaccataccgaagaaggcagcatggggctgattatcaacaaacaactgccgatatttgtcaacgacattatcaaagaattcaagtatatcgaaaatatacctttatacaaaggcggacctatcgctacagataccctgttctaccttcatacactggcagacattccgggtgccatacctatcagcaaaggactgtatctgaacggtgactttgatgagataaagaaatacatactgcaaggaaacaaagtagaccgctacatccgcttcttcctgggatactccggctgggaaagtgaacaactgagcaccgaactcaaagagaacacatggctcgtctccaaagaagagaatgcctatctgatgaacggagacaccaaggatatgtggaaacaagccttggagaaactaggcagcaagtatgaaacctggtcacgctttccgcaagtgccgactttcaattaatgtctcttcggattcagatactggaagatagcagcatctttgtaacatccaccgacctgtaaccaatccttcaacagtccgcactggacgaaaccgcaggaagtaaacagtttcatacagacttcattgtccgtagccacatgggcataaagttgagtcagcgacaagaaatcgaaagcatactcgcacagcaactgcaaagcgtccgatgcgtaaccttgccggcgatagtctttatgaacggctatgccgacctcaccacgagagtggagaggaacaaaatccgtgatatcaatcgtccccaatatccgatgatcggacttactcattatcatcaggcgcaactgcttgtcggcaaacacatcacactgggaaccctctatatattgccggagcacgtagcgggaataaggaacggtaaaattactgatatcccacatggaagggtcattctccatctcatacatcacatccatatcttccggctctaccgcacgaagatagatgcggtcattacttaaaaaagactgtttcataccggcttattctttattaatatggagttcgttacgaagtcttttctcgctgggcagacaaaaaagggaagcggtcagcccgatcagcatacagagatttccggtgttgctaagagtcagataatagcataatacgttgaggacgatagccacttcgagcaatccgaggcgtaccatgctccactgcacataacgcttcaacgcaagaggaatcgtcaggaggtctatcttctttttcagtaccagactgaacagtttcaaagcaagcggcacacacaaggcggtcagcaagatgcctgccgtctccatataataggtggcctgtgggttatcgaccaaagctcccacaggaagaaggtcgaactcccctgccccaagcaaaaaggcgggaagcacccaaaagaaaacataactgatattcaaatttctcactgcgcgttttatctgttcttccatgttagttacgatattcgttcaaataataaagttagattatacggttccggtaaaaagagtccggttgacaatactgcgtcccagagtgatctcatcggcatactccagttcatcaccaacggagatgccccgtgctattacgctgagtttgacccccatcttctccagtttacggtagatgtagaagttggtggtatctccttccatcgtggtgctcaaagcgaggatgacttccttgattcctccttcggatacccgctgtacgagactttctatttgcaggtcgctcggtcctaccccgtccattggcgagatcactccgcccagtacgtggtaaagtccccgatactgctgggtggcttctaccgccatcacatcgcggatattctctaccacacagacagtagaggcgtcacgctgcggattggcacaaatctgacaagtctcggtatcagatatattatgacatactttacagtactttacttcacgtttcagcgtaatgatggagttgccgaatgcctccacagtagccgtgtcctgccggagcagatgtaatacaagccgcattgccgtcttgcgcccgatgcccggaagtttggaaaattcgcctactgccttttcgagcagtacggaaggatattgttggttcatagattacgaatgaaattctatctgtttcgggcgcaaagatacggattattgtttttaatacaaagaaagtattacctttgcagccgatatgatgatattagtcattattatatgctattttgcgggcttgttgttaatagcccacattaccggacataaaggcggatcaaatgcagcgttctttaaaggagaaaacaaatcaccctggtatatagtctccttcggcatgattggcgctacaatttccggcgtgactttcgtatccgtaccgggcatggttcgcggaatggacatgacgtatatgcagaccgtattcggattcttcttcggctatatgatcgtagcacacatattgctgcctctttactacaggctgaatctgacaagtatctacggatacctcggtacacgcatcggcgtgaatgcctaccgcaccggctctttcttcttcctgctctcccgtatgctgggaacggcagccaaactgtatctcgtctgtctgatcctgcatacgcacgtatttcaggatatgcacatccctttctgggtgattgccgtcggctccgtggccctcgtgtggatatatacccacaaaagcggcatcaagacaatcgtatggacggacaccctgcaaacattctgtctgatcgcagccctgctattcatcatctacttcaccatacagaagctggatgtgggcttcgacggcatcgtacagaccatccgccacagcgaacacagccgcatcttcgtattcgacgactggatgtcccgtcagaacttcttcaaacagttcttcagcggcatctttatcgtcatcgtcatgaccggacttgatcaggacatgatgcagaagaacctctcctgccgcaatctgcacgaagcccaaaagaatatgtactgctacggattctcattcatcccgctgaatttcctgttcctgtgcctgggcattctgctgatcgcattagcgggacaaatgcaactggaactaccggccatgaatgacgatatccttcccatgtttgccacacaaggatatctgggacagtcggtactggttcttttcaccatcggcatcatcgccgcagctttcagcaactcagactccgcgctgaccgccatgaccaccagcgtatgtatagacctgctgaagacggacaaagacacggaagaaacagcccgtcgcaaaagaaagaaagtacacctgtccctctccatcctgctggctttctttatctgcctggtggagatgctgaacaacaaaagcgtgattgacgcgatctacatcatcgcctcctacacatacgggcctttgctgggcatgttcgccttcggactgttcacccggcgccggactaaggaccggctggtcccgctcatcgccatcgcctccccggtgctctgctacgctctggactggtggataaacaaagaaaccggatataaatttggctatgaattgctaatgttgaacggaagccttacctttgcggggctcatgctgctgtccggaaaagagaaaacggcgaaaacgccttgaaaactggcgtccggagtttataataaaaagtagtggagtttattataaacgtgaccatagtttattataaacgataagagagtttattagaagtagaaaaacaaagaaataaatgacaataaaatggaaataacgagtgcagaatttgtgattagcaacacggacgtgaagaaatgtccgacaggagtatttcccgaatacgccttcatcgggcggtcgaatgtaggaaagtcgagccttatcaatatgctgactgcccgcaaaggactggcgatgacctccgccacaccgggaaagacaatgcttatcaaccacttcctgatcaaccaaagctggtacctggtcgatcttcccggatacggctacgccagacgcggacaaaaaggaaaagaccagatacgtaccatcatcgaagactacatcctcgaacgggaacagatgaccaacctgtttgtactgatagacagtcgcctggaaccgcagaaaatagacttggaatttatggaatggctgggcgaaaacggcatccctttctccatcatcttcaccaaagcagacaaactgaaaggcggacgtctgaaaatgaatatcaacaactacctgcgtgaactgagcaaggaatgggaagaacttcccccgtatttcgtatcttcttcggaaaaccgcacaggacgcacggaaatcctcgactacatagaaaacatcagtaaagaagtctataaaaataagtaaacgaaaatgaaaaagaacattttatttattgcatgggttgcattattctcactctttgcaagcaacagtcaggcacaatcattaaaggatctgctcaacaaagacaacatctccaaagtagtaaatgccatcaccggaacacccgaaacgatagacatgacaggcacatggacttacagcggttcggcagtagaatttgaatcggacaatctgctgatgaaagcaggaggagccgcagccgccacgatggcagaaaacaaattgaacgagcaattgagtaaagtgggcatcaaagaaggacaaatgagcttcacgttcaacgccgacagtactttcaccagcaccgtcggaaaaaagaaactgaacggcacttattcatacaatgcttccaccaaacaggtagacttaaagtacttgaaactactgaacctgcacgcgaaagtgaactgcacttccaactctatggatttattgttcaactctgacaagctgcttaaattaatgacattcctcggcagcaagacaaacagcacagcactgaaaactgtcagctcactggctgaaaactacgacgggatgatgctgggattcgggttgaagaaatagtgttttatttgcaaaaccaaaagctctgaaacgccttctgacagggctcgaaaaccgaatcctaaccgaaagggaaaccgaaccttaaccagtagagaagagtagagtatataattctattctaaagaaatagaattactaagaaagagaagaaagaatttcgccgctgccgattcactttcagaacagaaatgaatcagaccagttcatctttgattcgatgttctttctgttctttacgttgttgaatgcgtttgtacaacttaacaataaatgctataaagtaattcaactcataaaagggagtcatatgatagaaatcaagttttgttttcataatagctggattttatgggtttgttccaaatatagtaattttttatgcgataaacaaaaaatatgagtattcattagcgtgttgaaatgaattaatttagcgaacagagatcggcagtattcacctcggtgctcacttctgctcgtctcggtgctcagcgtttttcgcctcgctgcttactctcattcagctcggcgctcagtgttccccacctcggtggtcaggattgccaagcccaaggacgatgataaacagaagttattttattccctttttcgataaaattaactctgccgacgggatagtttcagggaaaagcgttacctttggcatttgtaatcaataaaaagaaggaaaaatgaaaaagatactttttttaatgaccttgttagtggtaggagtaagtttcgcttttgcccagactaacgctgatatcaagtttgacaaaacaacacacgactttggaaaattctctgaaaacagtccggtagtaagctgcgtattcactttcactaatatcggtgatgctcctttagtaattcatcaggcggtagcgtcttgcggatgcacagtgcccgaatataccaaagaaccgatccagccgggaaagaaaggtacaatcaaagtaacttacaacggaacaggtaaatatccgggacacttcaaaaagtcgattaccctgcgtaccaacgcaaaaaccgaaatggtacgcctctatatcgaaggcgatatgaccccgaaagacgagaagtaagaaaaaatagacataacgtaaaggagaatctttcgattctcctttttttttgtttactttgaagtccattaagcataaactactaaaaatataatatgaaacaagaagaagacaaattcaccggactacccgagaacgcgttcagagagttaaaagcaggagaagtgtacaatcccctgatgagtccttccaaaaattatccggaagtaaacttctggtcagtaacatggggtatcgccatggccatccttttctcggcagccgccgcctatctggggctgaaagtgggacaagtattcgaagccgctattccgatagccatcattgccgtaggagtctccggtgcagccaaaagaaaaaatgcgttaggagaaaatgtaattatccagtctatcggagcgtgttccggtgtaatcgttgccggagccatctttaccctccccgccctttatatccttcaagtcaaatatcctgagatgacagtcagctttatgcaggtatttatcagctcgctgctgggtggtgtactgggtatcctgtttctgattcctttccgcaaatatttcgtcagcgatatgcacggcaaatatcctttccccgaagcaaccgctaccacacaggtgctggtgtccggagaaaagagcggcagccaggccaaaccgctgttgatggcgggaatgatcggtggattgtatgacttcatcgtggccactttcggctggtggaacgagaacttcaccacccgcgtatgcggagccggagaaatgctggctgagaaagcgaaactggtattcaaagtaaatacgggagctgccgtactcggtctgggctatatcgtcggactgaaatatgcttccatcatctgtgccggatcactggcagtatggtggatcatcattccgggaatgtccgccatctggggagacagcgtgctgaacgcatggaaccccgaaatcacttctacggtaggcatgatgagccccgaagaaatcttcaagtattacgccaagagcatcggtatcggcggtattgccatggcaggtgtcatcggtattatccgttcgtggggaatcatcaagagtgccgtcggactggctgccaaagaaatgggcggtaaaggcaatgtagaaaagaatatcgtgcgtacacagcgtgatctttcgatgaaaatcatcgctatcggctctatccttacgctgattctgatcgtgctgttcttctacttcgatatcatgcagggaaatatcgtccatacgctggtagcgattgcgctggtagcaggcatttccttcctgttcacgacggtagctgccaatgcgattgccattgtaggcaccaatccggtatcgggaatgacattgatgacactgattctggcttccgtagtgatggtagctgtcggactgaaaggtccttcgggcatggtggccgcacttgtgatgggtggcgtagtatgtacggcactgtctatggcgggcggtttcatcaccgacttgaagatcggttactggctgggtagtacgcctgccaaacaggaaacatggaaattcttgggaaccatcgtttctgctgctacagtaggcggtgtaatgattatactgaacaagacatacggcttcaccagcggtgcactggctgcaccacaggccaatgcgatggctgccgttatcgaaccgctgatgagcggcgtaggcgccccctggctgctgtatggcatcggtgcaatccttgctatcgtgctgacattcttcaagattcccgcactggcctttgcgctgggtatgtttattccgttggagttgaatgtgccgctggtagtaggcggtgccgtcaactggtatgtaacaagccgcagcaaggatacggcactcaatacggaaagaggtgaaaaaggtacgttgctggcatccggtttcattgccggaggcgcattgatgggagtagtgagcgcggcaatgcgtttcggcggtatcaatctggtcaacgaagcctggctgaacaatacctggtcggaagtgttagcattaggagcttacgctttattgatcctctactttatcaaggcttccatgaaagtaaaataagatgaggaaactgttatctgttatagtatcacttatgactgcaatgacatttgcacaacagcccgtcgagctacctttgtggcccgacggtgctcccaactccaacgggctgaccggcggggaaaaggaagtgtcgccccacagaatcagcaatgtcaccgaccccaccataaccgtttaccgtgcaccgcagccgaacggaatggctgtcatcatgtgtcccggaggtggctacagccgcctcgccatggatcatgaagggcacgatatggcatcctggttctgcggacagggcatcacttacgttgtattaaagtaccggatgccgaacggtcattgcgaagtccccttatcggatgcggaaagagcgattcgcatcgtacgcgagcatgccggagaatggaatatccatccccgcaaaataggaatcatgggagcatccgccggaggacatctcgcctctacccttgccacccattacagtgcggcatcccgtcccgactttcagattctgctttatccggtggtcaccatgacgcaaagtactcatggcggttcgagaaaagagcttctgggcggaaatccgaccgcagaacaaaaggtactcttctccaacgaactgcaagtgacatccgatactccgcaagcctttattgtcctgtcttctgatgacggtgccgtgcctccttccaacggagtgaactattatctcgctttacagaaaaacaatgttcccgcatcgcttcatgtctaccctaccggcggacatggctggggatttcgggacaacttcaagtataagcaacaatggacacaggaactcgaaaagtggttgcgtgagggtgtcgtatttccgaaggagacagcaccgatgttgagaatcggaaagacgtaccttggaacaaagtatgtagccaacacactggatcagggaacggaagaaaagttagtcatcctgccccaaacggtagattgccttactttcgtcgaatatacgctggctcaggcgatggggtcttcttttgccgataatctgcaaaagatacgttatcgggacggtgtgatcgacggatacacttcgcggttgcactatacctccgactggattgagaacggtgtccgccaaggatttctggaagacgttactgcacaaaacagtacgcagaccaccaaactgtctctctcctatatgtccacccatcccaaacagtacaggcaactggcggattcgccggaaaacgtgaaacggatggccgagcatgagaaggcattgtccgggaaaaaggtacactggctgcctaaaggcaaactctccgacgcaggacttccgtggatcatggacggtgatatcatcgccatcaccacgaatcttccgggactggatgtagctcatgtagggatggccgaatatataaacggaaagttgcatttgcttcacgcctcttctacgcttggcaaggttgttgtcagcgaagagcctctcagccaaatgcttcgcaataataaatcatggagcggcatacgtgtcgtccggatgtctcacccttaaaacaaatgattatgaaacgagtaaaacatttacttctcgcgtcgtgtctgttgcctacttttttgggggcacagggagtggcaagcgcctcttttctggagattactccggatgcccaatcggcaggtatggccggcacaggactggctatcactgacaatggaagcacggctatctttcataacgcttccaccatcgctttctcgcaggatgtaatgggtgccagctactcatacgctgacataaataaagactttggaatgcatagcgcatcccttttctaccgcatcggacgggaagggaagcacggatttagcgtaggattccgtcactacaaggatgccgattttcattggcaggacggtgcggaagatcatgcccgcgcatggaacgtagaagccgcatacttcagaaatgtagccaaaaacctgtccctttcattaacactcagatatctgcaggcaaaagcctataaggatgcggacagcaaagggtcagtctccgtggacctcggtgccagctatcatcgcagcatgggtattctggacgaaatggcttcatggacaatcggatttcaagccgccaacctgggtagcaagctggacggacagaaactgcctgcccgactgggactgggtggtgccatcgacctgccgttcagcatggacaaccgcttgcaggtggctcttgacttcaattacctgctcccgtccgagtaccgccatcttcaagccggcatcggagcggaatataatttcctgaaatatggaattatccgtggaggatatcacttcggggataacgacaaaggaacaggcaactacggtacactgggctgcggaatcaacttctggccgattcgcgcagatttctcttatgcactggctgataaagactgtttcatgcataagacatggcagctcggcattggaatcgttttctaggcttttccttcgggcagtccgctaagttttatcattgagcagagtctgccgggttctttcattgagcaatctgctgttttttttcgttcagcagtctgccaagctcgcattcaaggcgttgcttcacttcgtccataggcacttcgtgcttcagttcctgacgaagagaagtgacgcctttatctataaagccacaaggatgaatatagctgaaatagcgtaaatccgtattcacattcaaggccagtccgtgcatggtgacgtagtggctgctcctcaccccgatcgcacaaatcttacgggcacggggcgtactcccttccagccagacacctgttgccttttcaagccgtcccgcttcaatgccataggaggcacagacacgtatcacagcctcttcgagcaggtgcacatattccttcagccccaaatgaaactcttccagattcaagatcggataacagactagctgtccgggaccatgatacgtgatatcccctccccgatctatatggaaaagggtagcctgaatggctttcagctgatcgtcattcaacagcatattcttttcttttccgctacgtcccaaagtatagacgtgcggatgttcgcacataataatacggttttcatacggttctccctgcgcttttgcgcggacaagagtatcaaaccattccgtctgccgctgccatgcctcggcgtacggaatcaaattccagtctactaacacagttttcatgaggacaaaagtaagaaataaaaagaaaaatcgtacatttgtagatcgaatataacaagcactctaaaccaaagataacaaacactcttatgaaaatggaagttccacaagtagatttgccactggaggtgttggcatggactaaagtaactgaagatattctgaacatctacaagcaatcgtgccggctgcaggcgtgtattttcgccatctgtacggaaggaaccatgaaagtctccatcaatctgttggaatacgaggttcacccgaatgatctgattacattacttcccggaacaatcatacagttccgtgagaaagcggaaaaggttagtctttgttttgccggattctctgcgaaatgtatcggacatatcaacttgctgaccaccatcgggaacgcttatcccaagctgatagaacagccgatcatccctctttccgagaatatcgccgactatctgaaggaatattttgccttgttgtctcatgccagttgtgacgagtctttcaagatggactccaaattggcggacttatcactccagactattctgacaagtatccaactgatgtaccggaattattcgggaaacaatcattcgaaccgtaagaaggagatttgccggaagctgattcaactgatcactgagcactacaaagatcagcgttgtgcacagttctatgccgatcaactgggaatctctctgcaacatctgagcaccaccgtaaaacaagtgacggggaaaagtgtattggatactattgcttatattgtcattatcgatgccaaagcgcagctaaagggtacggatatgactattcaggagatagcttattcgctgaatttcccaaatccctctttcttctgcaagttcttcagacggcacgtagggatgtcgccgctggaatttagaaatagttgagtccgttacttctaaaatcaatggatcagtccgaaaaacagtttttgattccagatgtacagatttgagccaactatccgcatggattcccctctttctcgaaggaggggtacccgtagggcggggtggtaggtaaaacaaggttatctctaatttattgtgaatgaaagaattgcgtattcacctaccacctccccctgcgggtactcctccttcccgaaggaggagatttaagatactacagactttttagccagccccataaatccataaaggaacgttaagcaggctctcttcttaaatcttccttcttcccaaactcaacgaattgagcactacactcacactggagaacgccattgcggcacttgccagcatcggattcagcaacaatccgtttatagggaacaatactccggcagcgataggaataccgatcagattgtagatgaatgcccagaaaaggttctgatgaatcagtcgtacagtctgcctggacagttcgaaggctttgggaagtaacagcaagtcggatgtcatcagcgttaccatagcgacatccatagcaatatccgtaccctttcccatagcaatgctgacgtcagccaacgccagtgcctgtgagtcattgataccatcgcccaccattgccactttctttccctgcatttgcagttcacgcacaaattcggctttgtcgtccggcaaggcatctgccacaaatcgctcgatacccagacgggaagagactgccagagccgtccgctgaccgtcaccggtaagcatacagatatcgatgccctgacgtttcagttctttcactgcttcggcagaagtagccttgatcgggtcggaaacggcaatgatagccaaaagctcattctcacgtccgaagtatatgattccgtttccgtctgattcgtagtgtaccagcatatccgccataacatcgcttactgtagcgctgaaatctttcagaagtttatggctgcccacccagtaagtcttaccttgataagacacctttatacctttgcctgtgatgctttcaaaactgctcaaaggagcgggagttatcttttcctcgtcttggagtacggctacaatcgcgcctgccaacgggtgttccgatttcagctcggcagcaagaagtacatctttgaagtgttcttcctgcggctgtgcccacaaccatccggtagcggtaggatgtccttcggtcaaagtaccggttttatccagtaccaccacatctaccttacgcatctgctccagagcgacggcgtcttttatcagaatatgctgtccggcagctttaccgattcccaccatcagcgcagtaggtgtggcaagtcccagagcacagggacaggctatgaccagaacggatacagcagaaagaataccataagaaatatactcactgccaccgatagctacccacagcacaaacgtcagaatggcaattcccaacacgacaggaacgaagatgcctgtaatacggtctacgatacgctgcacaggagctttgctgccttgtgcttcctgcaccatgtgaatgatgcgtgccagcacagtatcacttcccacctgagaagcacgaatgatgaaggaaccgcgctgattgattgttccggcaaggaccttatcgccctttttcttctctaccggaatcggctcaccgctaatcatactttcatccacatacgaatcgccctccgaaagctgaccatccacgggaatctgttcgccgggacggactaccaccatatcgcctacctgcaacaggtctatttgtatctcttcctctaccccaccacgcaatacacgtgccactttgggctgcattcccatcagtttgcgaatggcatccgaggtatttcctttggcgcgttcctccatcatctttccggtcagaacgaaggcaatgatcactgcggaagcttcgtaatagacgtgcggttccagtccgcgatctgtccagaactgcggaaagaaagtgttgaacaaactgaaaaggaaggctatcgaggtactcaacgcgaccagcgtatccatattgctacgcccgatcttcgcctgtttccatgcccccgtgaagaaacttcctccgaagagcaccattaccggaatagcgagcaacatttgtatctcgttagaatatggcatgtgcattaataacatcgaaaagataagcagcggcacgacaaatatccacgcaccgatcactttccgtttcagacgaaggtagcgcttatgctgttcttcttcccgacgttcttctttattcgcttcttctactatcagatcataaccggcagcaagtaccgctgcacggatttctccgggggtgagcttgtcgtcctcataagaaatcgtcaatgtatttgaagcaaagttgacggaagcatcaacgactcccggcaactttttcactgtcttttctacattgttagcgcatcccgcacaatgcatattaagcacgggaaacgcattctttgctatattacccatataatcctttactctttaattaattagtatttataaaacaagcaaatacgggtatttgttcgattacttcttatcggccttcttatcctctttcttagattcttgtttgccatctttcttgccgtcctgcttggtttccttcacaaactcggcctcataattgaacttcttgaatcctgcctgcaacttcttcacatctgtcttttcggcatcgtaggtgatggacacggttttgttcttcagttcggtggaaagttccttcacgcctttctcgaagcgcatgttatttttcactttcttctcgcagttctcgcagtgcatctgagagactttgaatactactacacggatatcctttgccaacacggctgctacgctcaaaagagccaccacgcaagtggccatccatctttttgttctcatttttcttattcgtttaatggttattattcatttcttgccagattgaaacgtattccgatataggcttttgccccgtgcacaggtccccatatcatcgttgagtcgaagtttcctccccacgggtttgctgcgtcaatgatcggattcttctgtttgaagtttgtcaggttctcccctcctatgtagacagaccagcggcggaaatagcgggtaatctgggcactcagttgctcgaagctgccatagcggcgctcccaagatagctgaccgtctgccaactcataaggggaaggcattcttcctccgccattgagctgaagcgtagcatcaaactgccatattccgagtggagtctggtacgaagcggtcagcagtcctttgtatttgctggtcaacggtttctccatccgttggcctttgtaggtggtctgagcatccgtcagacggtaagctcccgtcaaggtaaatcctttaaagaaaggatagcttgcctctacttggaatacatgcgaataggaacgcccgtccagattgtaaaaggctacttcgtgaggattactgtccatatccactacgacttgcttcaggaagtctgtgtaataatattcggcattgatattcagcgttttgccaaatacaggtacgtaggtagatacactggcaccatagttccatgcttcttccatgtccagtcctttcgctatttcgacctttcggctactggaaagcaggtagttattttctgccagtacatgattcgtacgataaccttttccggcagagaggcggaagtgtacgtactcattcggattgtatttaagatgtgcacggggagtcacaaagaaaccgtgctcattgctatagtcaccacgcagacctgccatcagcatccactgatcattcagattcagcgtgtattgcgcataggctccgggaaccgcttctttggcaaaagccttgatgagcggcaattccgtttgattctccaaccgataatgctggtcataagcgtcatagttgaaactcagccccgccgagaaactgttctgcttattaaactctgtttcaaacatcaaagaggcatacacatttgtctggtctacattgtatagttttcgtccgtacatggcatcctgattgtgccaactggcagaaagaatcagtgccagattcgtattcttctccttattaaatatataagcattcttggtgaaaagttcgtaacgttcggtatcgattcctactttataaagatcacccgtctgcatatccgtatgatgtgcctgcccgctagtgcgactttcggaaagggccttgaagcctgcctgaaagacataatgatctcccatataggcccatcggttccacacgttatactgctctacttgggggatatccacgaagccgtcatcattgccgtcgtgcgctttggtttcgttttcataatgcgccagtaaagaggtactccaacgttttgacaactttaaggtggcgtccgcattcgcctcataccggttggtactgcttgcgaaaagattggcagatacccaatcggcctccggcaactgcggctttttgaactctacattaatctgtcccgtgatggcttcgtaaccattcttcactgatgagattcctttggaaacctgtatgctttgcatccacggaccggggacatatcccagaccataaggagatgccgcaccgcgatagttcgggatattctccgtgagcatctgtacataagttccggacaatccgagcagtttgatctgcttggctcccgttgccgcatccgaatagctcacgtccaccgaagggttggtcacgaaactttctcccagattacagcaggcagccctgctcaattcggcactgcttatcatctcttcgttcatcacgctgctgcgcaacttcatcgttcccattctgcggctgactacattcacttcgttcagttctacaccttcccgaagggtaatatccagttcctgattcttcttgctgacatgaaccgtgtcattctgaaagccgataaaactgattaccagcatgtgactcttcgaaggtttggagatagaaaagctgccatcttccttggtagttacaccctgacccgtattcacccagaatacattagcacccggaacaggctctccggtattatctttgactattccccgcacctgcgcttgtgtcgtaactgcaagtaatgagaacagtcccattattatatatttcattctttcttggacttagttttgcgatacaaaattaattcatttctcttgcaactgagttgcattcattctccttgttttcataccctgcaaaggctgaaaacaaagtacaatcggacaaaaaagatgaaataacagctaaatcagaaaaacggaatgtaacgccagcttctgcctcggacagggagatggcggagaaggaagactggaaaagtccaccgtccggtctatagaagtgaaagcaaatagctgacaatactgttcacagaaaagtgttatcaccggaacggaaactgtcagttcggaaatatgcttcatcaaatcgggcttatagatagttgccgtacagcccttttctctacaatctttctttgaatcgcaagtatgagacttcttacatttgggacagccatcggcacaacagccctgcacagtctcacaacgggaacagcaataatgaacaatagatactcccgcccctgaatagataatcaggagagaaaggatcactgctgttatgtaggctagtctcttcatttcgggagacaaagataaggtattccggcaacaatatcaaattaaataattctccatttttattcgtactactgatattatccgtatatttgaccacatattagttcttttaaatacatcatgtcatggaatatcatcgtatatctttcatccacaacgatacagagtattcgttcattaaagctataaacgggaacttaacaggatacgctttaatgtcagcttgccggatagaagtagtcaattatatgaaagaaaataacttgaaaggcagctatatactaaccggaatgtcaaaggcttaatcacatgaaagctaaaagagagcagatattaatcagaacttcctggataagtactattggtaatgccatactttccacatcaaaaatcatcgtaggtttatgggccggcagtcttgccgtgctaggcgacggtattgattcggcaacggatgtgatcatctccattgtcatgattttcacagcacgcattatcagccagccgccttccaagaagtacgtattcggctatgagaaagccgaagggattgcgactaaaattctttcgcttgtgatattctatgcaggggtgcaaatgttgatatcatctatcggaagtatcttttccgaagaagcaaaagaaattccgtcagccattgccatatacgtcacgatcttttcgattatcggcaaacttctattggctttatatcagtacaaacaagggaaaaagatagatagctccatgctgacggccaatgccatcaatatgcgcaatgatgttatcatttcctccggtgtgctgctgggactgatattcacgttcatattcaaactgcctatactcgactccatcacaggactaatcatcagcctctttatcataaaatcttcgattggcattttcatcgattcgaatgtggaattgatggatggcgtcaaagatgtcaatgtgtacaataagatattcgaagcagtagaaacagttcccggtgcgagcaacccacaccgggtaagatcaagaatgatcgggaatctttatatgattaccctcgatatcgaggtaaatccgcagataaccatcacacaggcccatcagatagccgacgctgtggagaaaagcataaaaagctctatagacaatgtctatgatatcttagtacacgtggaacctgccggcgaatgtcagacagacgagaaatttggtattgacaagggtatggtgaattgacggaaggcgttaaggagcaagtatatgctcccccgaagctgttatgattactccaccacaatcactgaccaccgtctcgtgctttccatccggagtgactatgatggaaccagtctgtatgatatgctttccgtccatcgtcacacgtatgcgggcgcttgtttcttctttttctttcttttccttctttgcagattcctcctcttccttatcctctatggctctgttccggtccatacagccattggtatgataacttttcatcttagtcacccggtcatcaacgaaccagatattaacgactcctgcaatacttgactcggaagtacgaaattccagcatctcactctcttcgtcaaaacttcgatagctcggtttacccataatggctattacttctttagaagacatcccacgttggataatactcaaattctcataagtaattctgcttgcataacaactgctgagcaatatcaccagcagcaaagacataaggatctgactctttttcataataggtatagtttagtagtttttttgaataccccaaatgtagtatgagaaaattcccttcgcaaagacttcttcctacttgcaaataggaatttccctatctatgaaaaacgacaggtataacctatgactactaacatttcttctctcaactatcctattggcttatctatcataccgtccgccacagagaatcaatgactgcataccttactgatatcaaccgtaaattcctcaccggcaggcatgaacttcccttttcgtttaaaaaatccgatcagttcgtccacttccatattatctgccgaacaagtataaaaacgctgatgttcgccaaacttctctacgattgcagccctcagagatgcctcagtataactatttccctccatcatgtgaaggacttcgtgtgcatgtaactgttccataatctattttttctgcaaagataagtacggcgtacagattaaaactgtaacatatgatacagaagcaagaaaaaaagaatcattaacaatggcatcccctatatacattgccgaagaaagtagctgaatatttttccttttttattcgcagtattcggtaatttcatttatatttgtcgatagtgatagatatgatcaatgttgaatttatagaaaaaacgagtatgaaaaaacaatatgtcagtctgcttgcggttatactttcggtaagcggctttttgttttcttgtcatgacaagatgaacaaaaacacgggagcattacaattcgatagtatacaggttaacgagacggcacacctctttaatgacaccgccaaacccgcgtgcaatattatcatcaacttcgcctatcccgtcaagtcgtcggacgagatgctgaaagacagtctgaacgcttacttcatctccgtctgcttcggagacaaatatatcggcgaaaagccagaagcggtagtgaagcaatacgccaagaattacattgacgagtatcgccacgaccaagagccgatgtacgccgaagacgaaaagaataaagaaagcgatgcagtggtaggcgcatggtactcctattacaagagcatcgaaagccacgtgcaactttatgagaaagacctgctagtatatcgcgttgactacaacgaatataccggaggcgcacacggtatgtatatgtcgactttcctgaacatggatctcactctgatgcgtccgctccgcctcgatgatatttttgtaggcgacttccaggaagccctgacggatctgatctggaaccagctgatggctgacaacaaagtaactactcacgaagcgctggaagacatgggatatgcttcgaccggagacatcgccccgacagagaacttctatctgagtaaagaaggtatcaccttctactataatatatacgacatcacaccgtactcgatgggacctgtcaaagttaccattccatactctatgatggaacatctgctgggcagcaacccaattcttggagacctgaaagattaaacagctattaaaagattgaacaccaatgaatatcctgttgttattgccccgtgtgatgcagaaggatattcatttcacttataaatcaaaattcaccattcaaaatacttaaagtggaaatcatactgaaatattttccggatctgacggaagagcagcgtaaacagtttgccgctctatacgacctctacatcgactggaatgcgaaaatcaacgttatctcccgcaaagacatcgaaaatctgtacgagcatcatgttctccattcattaggcatcgccaaagtgattcaattccgtcctggaaccaaggtcatggatctgggtacaggaggaggatttcccggcattccgctcgccatcctgttccccgaaaccaagtttcatctggtagacagcatcggcaagaaagtacgtgtggcgacagaagtggccaatgccatcggactgaaaaacgtcactttccgtcatgcccgtgccgaagaggaaaaacaacagttcgatttcgtcgtgagccgtgccgtaatgcctttggcggatctgatcaagatcatcaaaaagaacatttcccccaaacagcagaatgctttgcccaacggactaatctgtctcaaaggaggcgaactggagcatgaaacgatgccgttcaagcataaaacagtcatccacagcctgagcgaaaacttcgaggaagagttctttgaaacaaagaaggtagtatattcacaaatataggaatcaggagttatcaaaaccatgaaaataaagagatttgagtttaatatgtttcccgtaaattgctacgttttatgggatgacacaaaagaggcggttgtcatcgatccgggctgcttctacgaagaggaaaaacaagcactaaagaagttcatcctcaccaatgagttaacagtgaaacatctgctgaatactcacttacatctggatcacatcttcggcaatccgtttatgctgaaagagttcggtctgtcggcagaagccaataaggcggatgagttctggatcgatgaagctccgaaacagagccgtatgttcggcttccaattgcaggaagaaccggttccgttggggaaatatctgcatgacggagatatcatcactttcggacacaccaaactggaagcaatccatgtccccggacattcgcccggtagcctggtgtattattgcaaggaagaaaactgcatgttctccggcgacgtattgtttcaaggcagcatcggtcgtgccgatctgtcgggtggcaacttcgacgaactgatcgatcatatttgcagccgtttattcgtacttcccaacgagacagtcgtataccccggacacggtgcgccaacgaccatcggaatggagaaggcagagaatccattttttagataaaaaaagaatacaagtattaggtattaagtattaagtattaaccgtagcttctggcatatttatccgcatggataatacttaatacttaatacttaatacttaaaaacatcccccataaattatgaaaacagatttgttagctagccgtcacatcggcatcaatgaagaagacacagccgtgatgctccgcaaaataggcgtagactcactggatgaactgatcaacaaaaccatccctgccaacatccggctaaaggaaccgctggcactggccaagccgttgacggaatacgaatttggaaaacacattgccgaactggcaagtaaaaacaaactgtatactacgtacatcggattggggtggtataatacgattactcctgccgttatccaacggaatgtattcgaaaatcccgtatggtatacttcttacacgccttatcagacagaagtgtcgcaaggaagactggaagcgttgatgaatttccagactgccgtctgtgacctcaccgctatgccgctcgccaactgctcactgctggatgaagcgactgccgccgccgaagccgtaaccatgatgtatgctctgcgttcgcgtacccagcaaaaagcaggtgccaacgtagtctttgtggacgaaaacatcttcccgcagaccttggccgtaatgaccacacgtgccattccacaaggcatcgaattgcgggtaggcaaatacaaagagtttgaaccctcaccagaaatcttcgcctgcatcctgcaatatcctaactccagcggtaatgtggaagactatgccgacttcacaaagaaggcacatgaagcagactgcaaggttgccgttgccgctgatattctgagtcttgccctgctgactcctccgggagaatggggagcggatatcgtattcggtacaacgcaacgtctgggtacaccaatgttttacggtggtccttcggcagcctacttcgccacacgtgacgagtacaagcggaacatgccgggacgcatcatcggatggtccaaagacaaatacggcaaactctgctaccgaatggctttgcagacacgcgaacagcatatcaaacgcgaaaaagccacttccaatatttgtacggctcaggcactgctcgctacgatggcaggtttctacactgtatatcacggacaggaaggaatcaaaacgattgcttcgcgtattcatagcatcactgtcttcctcgacaagcaattaaagaaattcggatatacacaagtcaatgcacaatatttcgatacgctgcgtttcgagttgccggaacacgtttcggcgcagcagattcgcacgatcgcgctgagcaaggaagtgaatctgcgctattacgagaacggagacgtaggctttagcatcgatgaaacaacggacgtagcagctacgaacgtgttgctttccatcttcgccattgccgccggcaaggattatcagaaggtagaggacgtgccggaaaagagcaatattgacaaagcactgaaacgtaccacgcctttcctcacgcacgaggtgttctccaactatcatacggaaacggaaatgatgcgctatatcaaacgtctggaccggaaggatatttcattggcccagtcaatgatttccctcggatcgtgcacaatgaagctcaacgcagccgctgaaatgcttcctttgagccgtccggaatttataagtatgcatccgttggtaccggaagatcagacggaaggatatcgtgaattgatcagcaatttgagtgaggacttgaaagttattaccggatttgcaggtgtcagcctgcaaccgaactcaggtgctgcgggagaatatgccggtctgcgagttatccgtgcctatcttgaaagcatcggtcagggacatcgcaacaaaatattgattccggcttcggcacacggcacgaatcctgcatctgccatacaagccggatttgaaaccgtcacctgcgcttgcgacgagcaaggaaacgtggatatgggcgacctgcgtgccaaagccgaagagaacaaggaagcactggctgcactgatgatcacctatccgtcaacgcatggtatcttcgagacggaaataaaggaaatctgtgaaatcatccacgcttgtggcgcacaagtatatatggacggtgccaacatgaatgcacaggtaggattgaccaatccgggatttataggtgcagacgtttgtcacttgaatttgcacaagacatttgcttcaccgcacggtggcggcggtccgggtgtaggtcctatctgtgtagctgagcatctggttccattcttaccgggacattcgatcttcggcagtacgcaaaatcaggtttccgcagctccgttcggcagtgcgggtatcttgcctatcacatacggctacatccggatgatgggtaccgaaggcttgactcaggctactaaaatagccattctcaatgccaactatctggctgcttgtctgaaagatacttacggcattgtttaccggggagctaccggtttcgtcggacacgaaatgattctggaatgccgcaaggtacatgaagaaacaggtatctcagaaaatgacattgcgaagcgtctgatggactatggttatcatgcaccgactctctccttccctgttcacggcacattaatgattgaacctaccgaaagcgaaagcctggcggagttggacaactttgtagacgtcatgctgaatatatggaaagaaattcaggaagtgaagaacgaagaagcggataagaatgataatgtgttaatcaatgccccgcatccggaatatgaaattgtgaatgacaactgggaacattcctacacacgtgagaaagcggcatatccgatagaaagtgtgcgtgagaataagttctgggtgaatgtggctcgcgtagacaatacgttgggagaccggaaattattgccgacccgctacggaacgttcgaataagaagaaacttccaaaggaaatccgtacatgaaaaaataagcccggagctcagcagatgcgagctccgggcttacctttgttaagcaccgagcgtattccgataagcaccgagctaagtgaacataagaagcgataccgaaaccttacggttatcatgcagctcttcattccatgtttgtcggaaacatagcctggtggttctatctgacaacagtcactgttccggcttttaccattttctcccttagtgggattttaggatcagcatatcctaaagctacacagccatatactttatgattctccggtacccccaaagagcttataaattcacgaacctcgggatcatcgcaagtcgtacctaactgattgatccagcaagatccgattcccaaagaatgggcagccaaaaacatattctcaatcgcgcaggcacaatccataccggcccaccattgagtgggttcgttggacacgatcaccaaagtcggggcatgataataacagcaatacgccttgctatgaccacgttcctgtaatttcggttcatcgcttttagcaaaagcgcctttaatccgttcattcaattctgccagtttatccacattctgaatagcggtaaaatgccatgtctccaaatgcatcccactgggtgcaaaagtggcagtttccagaatagcctgcaagtcttcttccgaaacttgccggtcagtataagcccgtacactacgacgtgctttgatattttctaaaacttcattcgttttcatatactatatttactatacttacaactcgttcgccacttgcatttatcgttttaccaatccgatctttgcattcagtttgaagtaatacgtaccgttctctctttccaaaaagccgtatttgtctttatccagagaacctttctccaaacgggtattcaagaacaggaagtcctccataaccggtttctctgacttgtgatagcaaagaacttccccactcccatccatcaacaggataccttcaacagccgaatcctgtccagtatatatctttgccggacgcatacccaaggctaatgccatcaggaattgcttcactttaaactcatagaaaccatgtttgtttaccaattcatcttttattttcaacgggttcatctgtttgattacttccgtcagttcactgatacgggtgatgtcgtccaagtgcatgatgcgcaccatttctgtcagcacacgaggaaagtgtaagtcaatcattaaaagattgctacggaatacccgatctgccacgtccgagtatttgagtacaccacccaagcgctcaatcagcaacattcgttctgctacttcattaggggcttccggcaacgcattaatcttattcaccgtaggtgttgcaaatttgactccgctctgttccagtttcaagttagccgcacggcctccgtccaacagcggattcatagcacccaatcgcgaacgaacgctgaacccgctcaacggtgcctccggatgccagaaggcaatataaaaatcggtacgatcttccgtcttcgcttccagatcgaaaattgcgacttcatccaaaaactcttccaccccatccggagaagcgacttcatcctccgaagaggacttgacagcctgcaaaatcaaatctgccacagtcccgaaatcttcccgaggaacggatttctcactgttttctcctttgatgcggaccatctctttttctatatagtagcagcgcgttccgtcatgttcctcccgttgaatcattgcgataggccagttgatctctcctttcttcgctttagccgttcccaacgttacttttccttctgtcagcagacggaagaaagtatacagttcacaccattctctttttgttgcttcaaatgccatatattcttgtttttctttattttactcttcatcaagaatccttgcggtctccactttctccaatcgtgcacgcagtttgggcatcatggaacgacgaatacacaacgtcatgctgcaatccatatcgtacgattggctgagaatttccggttcttcctcctttacaatacgcatgatatcgttcataaaaggatattcaaacattacggtcacttcttcatctaccgttttttctataatggtagcggcagatattgcttcggcagcagctgctttataagctacaatcagtccgctcgttcctaacttgattccaccgaaataacggactacaataatcaggatatcggtcagttcattagagttaatttgccccagaatgggctttcccgccgttcccgaaggttcaccgttatcattggcccgaaaatcctttcgcgctgcacccaacatataagcataacacacgtgccgtgcatcataatacttcttctgatacgtttcaagatgcgcttttatctcatcaagggtacgcacaggcaaagcgatggcaataaacttgcttcgcttttctgtataaataccttcggaaggttcgacgattgttttataagtatcttcagcagtcatgccgcaaagatacggctttcttgacgaaattccatctgctgttcaaaaatattagagtatctcattgaaacgagcgcttcatttcatgcagtcaagcggtcgatgggatgcaatcaagcggtcaattggatgtagtcgggcggtcgtttcaacagaatcgggcggtcatttatacaaaagcaagcggtcaatctctcacaaacgtcctgttgattgtgagagattgaccgctctattttctacatagaatatgtcttaatccaacttatggataaccagtcctgaacgaagtttcggttcgaaccaagtcgttttgggaggcataatgttgccagtatcggcaatatccatcaattgcttcatggatacgggataaagagccagagctactttcatttctccactgtcaacacgcttcttcaattctcccaaaccgcggataccgcctacaaagtcgatacgcttatccgaacggaggtctttaattcctaaaatctcgtctaaaatcagattagaagaaatagtaacgtcaagcacgccgataggatcattgtcattgtatgtacctgcctttgccgtcagactataccacttgtcgccaagatagagagagaaattgtgcaaaccggacggtttgtagatatcagtacccttttcttctacaacaaagttcttatccaatgcagcaagaaattgttcgggagtcagcccgttgaggtcttttactacacgattatagtcgatgatagtcaattgattggcagggaaacatacagccatgaaatagttatactcttcatcgccacgatgattcgcattttgctttgctttctcggcacctaccaaagcagcggcagcggaacgatgatgcccgtcggcaatatatagtgccggcattttagcaaactctgcagtaattgcagcgatatcttcgtcctggtcaacaatccagaaagtatgtccgaagccatcacccggagcgataaagtcgtaaacaggcttttcggcagtgtatttccggatgattgtatccaatttcgcattatcgggataagcaaagaatacaggttcgatattagcattgttcacacgaacgtgcttcatacggtcttcttccttatcacgacgggtaagctcatgcttcttgatgataccgttcatatagtcaggaacataagcgcctactaccagtccatactgagttttcccgttcatggtctgggcatagatgtaatagttttccttagcatcctgcactaaccagcctttatcctgaaacagccggaagttttcggcagctttctcataaacacgttcatcgtgttcatccgtaccaacaggaaagtcaatctcgggcttaatgatatgataaagggatttttcgtttcctgctgcttctgtacgcgcttcttctgagtttaatacatcgtaaggacgggaagcaacctgttcaaccaggtcttgtggagggcgaatgcctttaaaaggtttgataatagccataagtcatggtatgttttaagattagtagaacagatacgccctcgcaaaagccgagggcgaaatctgataacatatttctgaatatactacttaatgtacaccagcacctatcatcaaataagtgactgagcaacgataagcagtcttacgattcatctcattatttgtttactctgaacttctcgcagccgtctttcaggaaaccgacaatctgttgagcagcagcaataccggcattgatattcgcttcggcagtctgtgcacccatcttcttcggagtagagaaataacgtcctgcgaacttctcagcaaattccgcattagcagcaggcatgatatctgtcatatacttgaagtcggcacggtcttccatcaatttgatcaactcggcttcgttgatcacttccttgcgggcagtgttcaccagcatagcgcctttcggcatatctttcagcaaagcgtagttgatagagttcttcgtttcagcagttgccgggatgtgaagagacactacctgacaagtcttgtacagttcttctgcagagtcaagtgccttcacgccatctttttcgatcacttctttcgggcagaaagcgtcgtaagcgtacacttccattccgaagcctttggctacacgggcaacgttgcgaccaacgtttccgtatgcatgaatacccagtttcttgcccatcaattctgtaccggaagtaccgttatagaagttacgaacggcgtataccatcatgcccaatgccagttcggcaacagcattagagttctgtcccggagtattcatcacgcaaacattgtgagcggtagcagcagccaggtctacattatcgtatccggcaccggcacgaactacaatcttcagttctttagcagcatccagcacctctgcatcaataatatcactacggataatgatagcgttagcatctttcactgcatccagcaactgtgctttatcggtatatttttccagcaaagcaagctcatatccggctgcttcgatttctttacggataccgtctacagcaactttggcaaacggtttttcagtagctacaagtactttcataatttatctgtatcttttaaaaaagattcaccacagatttcaccggcctacacactatattcaataagatttcagtgtaaatccgtgcaatctgtggtgactctatttatattattaatgaagtttttcaaattcctgcatgcagtcgatcaaagcttgtacgctttctttcggcagagcattgtagcaagatgcacggaaaccacccactgaacggtgtcctttgatacctaccatacctttttctgtagcgaacttcatgaagtcggcttccagatccttgtattcgggagccatcacgaaacagatgttcatgcgtgaacggtcttctttggcagcagtacctacgaacagtttgttacgatcgatttcagcgtacagcatatcagccttttcgatagcacgacgttccatttctttcacaccaccctgtgccttaatccaacgcaggttcaacagtgcagcataaataggcactaccggaggagtgttgaacatagaaccgttatcgatgtgagtctgatagttcagcattgatgggatgtaacgagaaactttacctaccgcatcattcttcacgataacgaatgtaacaccggcaggagccagatttttctgcgcaccaccatagatacagatatatttggaaacgtcgatcggacgagagaaaatatcagaagacatatcggcaaccatcggaaccggagaattgagatcttcttttaattctgtaccataaatcgtgttattggtagttatgtggaaataatctgcgtcagcaggaattgtgtaatctttcgggatgtaagtatatgtagcttcagcggaagaagcaacttctacgacttcaccaaaccccttagcttctttcattgctttctttgcccacacacctgtattcagataagcagcctttttttcaaggaagttgaaaggtaccatgcagaactccatactagcaccaccaccaaggaacagtaccgaataaccttcggggatattgagtaattccttgaataatgcctctgcttcgtcaaccacaggttggaagtctttggcacggtgactgatttccatcagggagagaccagagccgttgaaatctaaaatagccttcgctgtatcctctatcacctcacgcggaagaatggaaggtcctgcattgaaattatgctttttcatttgaagtttgtttttggtttaacatttcgttagtttatgtcttttgaccttgcgaatttacgaatttatttccggtgcacaaatctttccttataaaaatactgttttaaagcagatttctctttctttttattggtttatacaagatatatacaccatattgttatctatacatatcaagcaagggataaaaggcgaaaatataacctgtggaaaataatcggttacagagtgaaaggaaaacggttataaaatgaatatttattaagaaagacagagaaaaacgaggatttctcaccctaacaagcgatgagactaaaattataaaaattagtcagaaagaaaggagtctccaataccttcccaaaagagaagaaatggagactgtcacagaattgttctttactatcattttagtctgtcatccatgagagacgtctctcacttcaaaagaatgatattatttgtaatgacaaagccgatcatttcgtcattgtcagcatcccaatcacctatttggttcttgaaattcacctttcagctttgagaacacctgttgtttttcggctccctttatttggcttcctcaatgatagtcttcattcctttgattttttccccttgaataagattcaggagttgcttcacttttgcccgacgaacggcaacaaaagcataatgttctttcacatcaatcgcacctacatcttcacgggtcagattaccttttttataaaggaatccggcaatgtccatccggctcagtttctccttctttcctttacctatatatatagtagtccaaacagatttgggaggacgtgaaggattttccggcagttccatcgtttctacatcttcgggaatatattccggtagtttttcttctgcgtgaagaatcagataagaagtacctgttgcgtcccaacgtgccgtacgtccgttacgatgtgtaaacgcttcctcgtttacaggcagatgatagtgaatgatatgctctatctccggaatatcaagtccacgggcggcaaggtcggtagagatcagtacatgacagcttccgttacggaacttatacaatgcccgttcccgatccggctgttccataccgccatgaaaacgttcggctgatagtttcttatcttcgagtagcttgtgcacacgatccaccgcatcccgatgattacagaagacaatgctggagctgcttcccaatgaacaaagcaagttgtaaagcgtatcaatcttatctttggaaggagaaagcaccttcatcagcttcaaccggttttcctgttcttcggttgcctccggaagaaaatccagtttgactgtccggttcagtcccgtaaactgaggaatttcttcggcatcagtagccgacagcagcatacgtttctttaatcccggaagctgggtgatgatctctgccatctcatcatgaaagccgaactccagcgacttatcaaactcatcgataatcaaagtctcgattgtttcgggatcaaagtttcctttggacagatggtcggtgatacgtcccggagtaccaaggataatggcaggatgatttcctgcaatgcttttcttttcttcggcaatgggatgcccgccgtagcagcaacacgttttccaggaagttcccatgctccggaacacggtatctatctgtaaagccaactcacgggaaggtaccagaatcagcacctgcacgctgtcatcattcggttttagggtaagcaacagaggcaaaagatatgccaaagtcttgcccgatcctgtcggtgacaacaggataacatctttcctgcccgtgccctgttcgagcgcagcttcctgcatcgggttcaaagattcaatcttcaaattctgaagagcggactgtattatttcatttttctctaacatggggacaaagatacaaaaaggacgaaaagattcggtaagatagcgcataaagaaagcgggaaatctgaaaagcaccattgtcttttacagatttcccgccagttttctttatgttattcttccggtcctctccgaccggagatcaacttccgaagattatcctccaaagttatcgaacatcaggttctgagccggaacgcccagatcgtcgagcatcttctcaacagctttcgacatcggaccaggaccacacatatagtattcaatatcttcaggagcttcgtggttcttcaagtaagtttcataaattacgttgtgtacgaagcccggagtatatttcacaccggcagcatcagcagcaggatccggacggtcgagtgccagatggaatgtgaagttcgggaaatccttttcaatttgcaggaagtcttccagatagaatacttcgttcagcgcacgggcaccatagaagtaagacatcttgcggtcggtcgtatgcaatgttttcgtcaagtgcataatctgtgcacgcaacggagccataccggcaccaccaccgatccacatcatttccttgttagagtcgaaaatcggatggaagtctccataaggaccactcattattaccttgtcacccggtttcagcgtaaagatataagaagaagcgatacccggcattacatccataaatccgggaccttgttctttcggcttgaacggaggggtagcgatacgtacagtcagcatgatacggtcaccttctgcaggatagttggccatagagtaagcacggattgtttcctcttcattcttacatttcaagcccagcaaaccgaatttctcccatgcaggcagatattcttcaccgatcaggctcttatcaatgtccttatcataatccattgagaatttaggtatcttgatctgtgcgtaagaacccgggataaagtccatgtgttcgcctttaggcaatgccacgataaactctttgataaatgtagccacgttcttgttggagatcacttcgcactcccactctttcacaccgagtacagactcgtcgatcttgatagccatgtcactcttcactttcacctgacagcccagacgccagtggtcttgttgctgtttgcggctgaagtgaggaacttcagaaggcaggatttcgccgccaccttcaagtacctgacatttgcactgtccgcaagaacccttgccaccacaagcggatgacagaaatacaccgtttacggccagcgtattaagcaatgtggaaccggactctacttccagtcctgtttcgccattgatcgttagtttcacgttacctgacggtaccagaaatttcttggcaaccagcaagataacaacaagcaacagaataaccacaaggaataccccaatgcttgataatattaaattcatatccattgtcttattcctttctttttagatgttcaaaccagagaaacacataaatgcgattgccatcagacctacagtgataaatgtgatacccagacctttcagcggagcaggtacatcagagtaagccattttctcacggatagcagccagaccgacgatagccaacagccagccgatacccgaaccgagtgcatacgaaagagcatcccagatatcaccaatgtatttcggatcactcggacctacgttgatacgttgttgcataaacagcgaagcacccatgatagcacagttaacggcgatcaacggcaggaagatacccagtgaagcgtacagcgacgggctgaaacgttctaccaccatctccaccaattgcacgataccggcaataacggcaatgaaaagaataaaactcaggaagctgaggtcaacaccttcaatgatagcgttggcagccagcaccttggtttgcaataaatagttcaccggaagcgtaaccagcaacacgaatgttacggctatacccagtcctacggcagtcttcacattcttcgatacagccagatatgagcacatacccaagaagaacgcgaatatcatgttgtccacaaagatggagcggacgaataaacttaataaatgttccatatattttaattaagaattaagaatgaagaatttcgagtttatgagtgttaccttcattcatccttcttcacccttcatttatattaattactttcttcttgcagttctttgtgacgtgcacgctgataccagatgatgcaagctacgataatcaatgccatcggcggcatcaacatcagaccgttgtttacataaccgatattctggataggctcataattcaggatattgaaaccaagcaaagttcccgagccgagcagttcgcggaagaaagctacgattaccagaatcttggcataacccagaccgttaccaactccgtcaaggaatgattcccaaggaccgttctgcatggcaaatgcttccagacgtcccatcaggatacagttggtaatgatcaaacctacataaacagagagctgtacacttacatcgtatgcaaatgctttcagaatttcactaacgatggtaaccaaagcagcaaccactaccaactgaacgatgatacggatacgatttggaatcgtcttacgcaacagtgaaataacgacattggcaaacgctgtaatcacagtaactgaaagtcccatcacgatggcgggttccagcttggcagtaacagcaagtgcagaacagataccaagcacctgtacggttaccggattatcgattcccaacggagcagagaatacttctttattcttctttgaaaacagttgtcccatattctttatcctcctccttattatttagttaaaaaacttatgtaattattcagacaagccttcagcatagcatccacacctaccgaagtaatcgtaccaccagagataccgtccacttggtaatcaggtttttctaccttaccattcttaacaacacccagagcaacggcaccgttttccagtgtcttcttgcctgcgaattcatgctggaaccagtcagtagcgatttcagcacccagacccggagtttcacttgcgtgtgagaagtatacaccgtaaacagtgtctttatcctcgttcagagcaacgtatccccagataccgccccaaagaccggcaccgtatacaggaaccacatatttagtctgaccgtctacatcacatacaaatacgtgcagacgttggtgttctttcacttctttctcgtagttagtggcaaactcacctgtgttttcagtcagcgtgccgtctacgttcatcagcatatcaccttttacatatttctgatattcggcatcagcgtcttctacatttttaatgttcaatgcagcaagaatctgctttttagtgtccaactgcacattcttgtcttgtgtagctttcagtgaagaactaacgaatgccagcaggaatgcaacgataataaccattaccgaagcataaatgatagtataactattactatttgtattcattttcattcggtattattggttagacttaacagcgcgtttctcgcgacggctgatattgctctgtactacacagtagtcgatcagcggagcgaagatgttcatcagcaggatggcgagcatcataccttcgggataacccggattcagtacgcggataacgatagccatcacaccgatcaggaatccgaagatgtatttacctctttccgtacgtgcggatgtcacaggatcggtagccatgaatacggcaccgaagcagaaaccacccagtacaaggtgttcgtaccaaggcatctgagccattgtgttgttttccatgccgatagcattgaatacccaggccataaatgcaccaccaacgaatacggaaagcatcgtcttccagcttgcaacgcctgtccacagcaggataacggcaccgatcaggatggcgatcacacttgtttcaccgatagaaccgggaataagacctgttatcatatccatgttgaatgcaggaaccgtgcccgatgtagcggcttgtcccagcggggtagccacagtcagaccgtctacagcctgtcccataccgaaaatggtatcgccggatacccaaacagcgtcaccggacatcttggtaggatatgcgaagaacagaaatgcacgagtgatcaacgctacgttgaacacattcatacccgtaccaccgaatacttcttttgcgaagatgacagagaatgcagttgctacggcaagaatccacagcggacagtctaccggaacgatcatcgggatcagaataccggaaacgaggaatccttcctgaatctcttccttcttccattgagctacgacgaactcaatacccagaccgacaacgtatgatacaataattttaggcaatacagccaggaatccgtagataaacatttcgatgaagctgccagtagcacccgtgtgggtgaaatgctggtaacctacgttgtacataccgaacagcagcgccggtactaacgaaataaccacaatcgacataatacgcttgctgtcgatcgcgtcgtgtatgtgcgttcccgttttcgcagtcttgctgggcacgaacaggaatgtttcgaagccgtcgaacaccgactggaatgcgtggaatttaccgccctcctcaaagttcggctttatcttatcgagataatttcttaacgctttcattaatatattactattttacgatttacaatttacaatttgccatgcggattatgccatttcagcacggagcatgtcgagtccgacacggacgatgcgttggagttccatcttcgaagagcagacgaattcgcagagtgcgaagtcttcaggagccacttcgtagatacccagcgcttccatgcggtcgatatcaccggcgatgatcgctttaatcagatattcgggcatgatgtccatggggaataccttgtcatattcgccggacatgatcatgtggcgttcgccgcctttgacacgtgcatccagcgtatattcctttttgcccatcaaccagctgaaatatgagtggttggcactgaactggttgaagcgcggcatgatccatccgaacatttcgtgaacgtcatcaccttcggggattacagtcagttggctgtggaaagcgcccaagaatccgttaggagaaacttgtttgccactcagcacgttaccgctgatgtagcgcaaatctttgtcagttgttacgtttccggcaaatacgttggtcagcaatgcacctacctgaagtttgcagtaagcaggtttcaacacttcggaacctgtcacggctactgtgcgggtaaaattcacacggcctgtattgaagaggcgaccgatgaagataacggcttgcggatcgattgtccacacagtttcgccctttgaaacggggtcgaggtggttgatctgaacgcctacgttaccggcagggttcggtccgtcgaaagcggtgattgtaacgttcttagcctgtgtcagtgcagcggctttctgtttcacgctgatgctcaggtaagtttttgccattttggcgagggcatcaagacctgtctggaagtttgcttcttcgcctttcagagcaaattcgaagtcgggagccagcggattggtatcgaatgcggaaacaaagatgcccttcggtgttaccgtcggatctgcaatgatgtcatacggacgttgcttgataaacgcaaacagacctgcttcaagaagcgcggacttcacagcatctgcatccatagaggatacgttcttcttaccaaattcttcgtagtcctgctctgcggcagcttccactacgatgttcaataccttacggcgagcaccacgttcaacgctcgtcactacgccactcacgggcgaaacaaatttcacttcaggatgatacttgtcgataaacaagggtccaccagccatcacatattcctgctctttcacaaccactttcggtgtcactccaggaaaatcatcgggtacgagtgcgtaaaatcccggctctttcactgttgtgtacgtctcagcagctttacctttcaggtttatgtcaaggcctttacgtaactttattacatttgccatgctatataaaataatggtttcataaaatttgccgcaaaagtaataaataataatgtgattcgggaggaaaaaagaaaggaattacggaaaaatatccgtaattccttttgtgttcgcacacgttctttaataaagtaggctggaagacctgcgcgcacaagtctatgcagcgtgattgtcggttggttattcttcgccggcaaacattggatcccacgccggcaggcggatcggttcttgtttcaagacttcgagtgctttcggggtcacgtatttcgtttccacaacaagacggaaggtatattcgttgaaccattcgtcggtcatgatgagatgtccctgatagccggctccggcaccccaactattttcaaccatccatttggtcggttttccgtttttgtccagatcgactgccatgagggtcatggcgtgactggagctgctggcaaagctttgaatacgctgtttcttgtccatgccgaaggtggtgcccatcaatgagtcgtaatcatagtttttgacgtcgagcagaccacggtcagagttcaggaacttgccgacgtcgcaggagtaatacatcatggtgctgtctttcagagaggcgatggccatctccttgatgtcctcgatcgggaggttgacgtatgtccagttcttaccgtcgtagcggtggcggtcgtagtctatttcataacatttgtagtattcgcggctgggatcgttcatgagcatgacgtagttgtcgatcagcttttcgtcaccgtatttcttcaggaaagaaagcggggtgtaggtggcggtttctacaggctcgcctttgacattatattgcgtccaggtaaattctgtgggaggtacgcccaagttcaggacaagcatacggtaaatggtgctcaacatttccactttagcgttctctatagcggcaggtttagcttttttcgaagccatgtcacggagttgtaacccctgttcgcgaagtttcagagcgatcagactcgccatgcgggcggtgttttcgctgctgttcgtttcgggcatcacgtctttggggacgagaccgtatttgcttacgatgtccgctactccggtgaatgtgccaccgtcgctcaacggattgcggaacagccattccaccattttatcgttcataggcttgtcgctggtatcgatgactccttggaggaaaaggttggccttttccagctggtcgaaaaagaaaggataggtttgcgagaattcgaaagaacccagattgtatttgtcgatggctttggcacgcattacgttcaggccggtgaagagccagcagcgtccggacgatttctggtcggtgatccccttggagttcactttgacagaaaaatgtgtatccatccccttcatgttgtcctggttcagggcaagcttgcggatgtcgttgttgctgatggcgttccggatagccttgtcggtagaagtgccttgataactctgtttgatttgctgcatcatgtcagcgctgatgccgcctttcgcgtcctgtgcctgtgcagaatagtaaagggcacagcaaacaaaaactgataaaattcgtttattcattatagatcgtttataaattaactttgcctgtatgctaatagtaatccgttggcaatttcgttttacatattattaattggcaaaaatacgattcttttttagatttattatctatgagaatgaaaactaatcgaaataaaatagtttcctttgcagcggatttcaagaaagaatatgaaaagatatacaataggtatattgatgatgtttctattcatcaatatttcgttagctcaaacggctgacacggcagtaaaaagcgatgaactgcaaacgactacaacttctgttgacgaagtcggggtagccccggcagattccacccccaccctttccaaaaaagaattgcgacgtcagcgtgtagccaaacgtaatctacactataatatattaggtggccccagctatactccggacttcggattactgatcggcggtagtgcattgatgacgtttcggatgaatccgagtgatactacccaacaacgttcggtggtgccgatggccatcgccctgatgttcgaaggaggactgaacctgttcaccaaaccgcagcttttcttcaaaggcgaccgattccgcatcttcggagtctttgcatataagaatacactggaaaatttctacggcatcggatacagcaccaacaaggactatccgcgtggcgaagacaccagcgaataccgttatagcggtgtgcaggtgaatccgtggtttttattccgtctggggaaaagcaacttctttgccggtccgcagatcgacttcaattatgacaagatcactaaacctgccgcaggaatgatagagcaaccatcgtatattgctgccggcggtacggatcacggctactctaacctcagttccggagtcggtttcctgctgacgtacgacacccgtgacgttcccgccaatgcttatcggggaacgtatctggactttcgtgggatgatgtacaacaaagccttcggaagcgataataatttctaccgtttggaaatagactaccgccaatacaagaccctaggcaaacgtaaagtattggcttggacagtgcaaacaaagaatgtattcggcaatgttccattgactaaatacgcactcagcggcactcctttcgaccttcgtggttattatatgggacagtttcgcgacaagtcatcccacgtgatgatggcagaataccgtcagatgataaatacggacaaaagcaattgggtgaagaagatgctgaatcatgtaggctacgtagcatggggaggatgcggcttcatgggccctactccgggcaaaatcgaaggtgtacttcctaatctgggactcggtttacgcattgaagttcagccccgtatgaacgtccgtcttgacttcggcagagacatggtgaacaagcagaatttattctatttcaacatgacggaggcattctaaacaagtatttgctcataattaacaagaaagatgataaaatgcttccataagaacatcattaaataaaattaatccttatatttgcgttgctataacacagcaaaagcagataatagggttaatttatgaaacaaatcaaatacctcttcggaggattattatttttgtttgcctccatgggaagcgtaactgcgcaagaggtaagcgattactcaaaactacagccaagtgattattccagcattacacttccaccgctggatcttcttttcgagaacgcaaaaagcgctccaacttacgaattagcttcagtaaaagaacaaattgaacggaaacttctggcaaaagagaagcgtgccttcttaggctttttcagtttacggggcagctaccagtatggtatgttcggtaacgagtctacttataccgatgtagcgattgcaccttacctgacctatgcaacacaggcacagaacggatatacggtaggtgcaggagtcaatattcctttagacgggctctttgacctgacagcacgggtaaaacgtcaaaaactgaatgtgcgcactgcccagcttgaaaaagaagttaagtttgaggaaatgaaaaaggaaattatcctcttatacgcaactgcgacctcccaattaaacattcttaaacttaatgccgaagccctcatgcttgctaatgtacaatatagtatagctgaaaaggatttctcgaatggagctattgactcggggactttatcatctgaaaagtctcgccaatctgacgcacaagagaaattcgaaaacagcaaattcgaactaagcaagagtttaatgatacttgagttaatcacccacactcccattttaagaaacaaataaacatacatttatggaatacatcctttatatcagcagattcctatatcgtatccgttggtggttagtaattggaacagccattataacatttgctgtttactattttggaaaacgcatgataggcaaaacatataatgtagaggcaaccctctacactggtgctgcttccggctacaatctagaaggtggaaataacaaagtggattgggcgacaactcagaacgctatggataacctaatgaacattatcaaggctgaaagtacactcaaacgggtatctatgcgattatatgcccgaagtctgatcaaaggtaatccaaaagaagacaatgaattcatcaaagccagcaattacaacagaatatatgaacacctaaagaatagtccgaacgggaaagaaatactgtcattaatagataaaaacagcgaagataaaacggtagccaactttttcaattacttgagaccgactcaagcaaactatctctatggagtattctattataatttgccctattactcttataatgatctcagagcaatcagagtagcgcgtaaaggtgccagcgatctgattgaaataagttatacggcaagtgatccgggtatcgcctataataccattgacattctgaccaaagaatttgtaaacgaatacagtgcaatccgttatggtgaaacagataaagttatcgaatattttaaaagcgaacttcaacgcatcggaaaggaacttcggcttaaagaagactcactaacgcaatataacgtagaaaaacgtgttattaattattacgatgagaccaaagaaatcgctgccatcaacaaagagtttgagttacgtgaacaaaacgtactgattgcatacaatagcgccaaagcaatgttaaacgaactggaaaagcaaatgggcagcaatgccaaacatgtaatcaacaatcttcagttcttggataaactaaatgaagccgcttcgcttacaggaaaaatctcagaaatggaaacgatttcaagtgatcatcagaatcaagaagcctcattacaggaatataagaatcgcttaaatcaaacgcgcaaggagctttccgagctttcaaacaaatatgtagagaacaaatataccaaagaaggaatagctaaagagaacatcatagaacagtggcttgaagtaaccatgcaatacgaaaaagccaaatcagacttacaaattatacagcaaagccgtatagacctcaacgagaaatacagacagtttgcaccagtaggttccactatcaaacgtcaagagcgtaacataacttttatagagcaaaattacttgtctgtattgaaaagctataatgatgccctcatgcgtagaaaaaatttggaaatgacctccgctgcattaaaagtattaaatgctccggcatatccgatcagtgccatgcccactcctttgaaaaaaatggtgatggcagcgtgtgccggtaccttcatatttattttggggttcttcttaattcttgaattattagaccgtactctacgcgattctattcgtacacgtcgtttgattggacttccgatgttaggcgcctttccaaaagactctattttagagtatcacaattatgttgaagaatcaaaaagtatagctacaaaacagttaagcaatagtatccttcgtttctgtcagcaaaagaaagaaggattgccctacattatcaattttattagcacagaaggcggggaaggcaaaagttatgtgatcgaagccctaaaaaaatactggaacagtatcggacttaaaacaaaagtaataacatggaagtcagacttcagaattgattcacgagaatacaacctggccaaaagcattaccgatctatacacatcagaggaagaagatattctcatcgttgaatatcccaatctgcgggaagctagcatatcgctggaattactacaagaagctaatctaaatatactcgtagcccgtgctgaccgtggttggaaagagaccgataagctcttgtcagaaaagctaagtcaacaagtaggtaaaactccactttatgtttacttgacacacgcatcccgcaatgtggttgaagactacactggtatgcttccaccatatacactttggaggaaaatagtataccgactgtcacaattagcattgacagaaagtatatttacgttcacaaaaagaaagaagcagccggcaacatcaggagatgaagatgacgaatgataaaggaaaatacagtcaatacttaacagtagccggtaactattttgccaataaaggatgggtacatttactattggcaggaggattgtatatattatacaaaatgttctttcgtacttcccttcctttctttctgacgattagttcattacctttaatgacagttattttcttattaattatcaaatattcaaagcaaagtttctatacacttttcattctccaattcctgctggcagcagcttatgcagtgacagacataccattgggagtagcaacattaatgtgtacattgtttgccgttgttttgctctttgcgtacggaatgcatgaaaaaattgactggtcggaaagtcgtaatggtatgcttatgctttttctgatatggggagtttattgcatattagagatagctaatccgaacaatgttcaggcagcatggaatatctccatcacccattatctcatatatcctattgtatgtgctgtcatcgtaccgttagcaatccgtaacatcaaggggattcagtggcttctaattatatggtctcttttcatcctcttggcagcagccaaaggatattggcaaaaaaactgtggttttaatgaacgtgagcagtattttttatacgttttgggaggagcaagaactcatattatttggtccggtattcgttatttctcattcttcagtgatgcagcgaacttcggcgtacacatggctatgggtgtttcactttttggaatttcacttttttatataaaaggtgtatggctgaaaatctattttataattgtcattattgccgccatttacggaatgggaatttctggaacacgggctgcgatagctctgcctatcggtgctttagggagtttcattattctttcacgcaatcgcaaagcatgtattacaggtatttcagttcttgccttgttattcttgttttttgtatgtaccaatataggagatgacaatcaatatatccgcaagatgcgttctgcatttcgtcctagccaagacgcttcctatcaattacgtgtagacaatcgaaagagaatgagagaattgatgattcacaagccttttggatatgggatagggttatccaaaggcgaccgtttctatcccaaagaacgtatgccctatccaccggattcctggttagtctcagtatgggtagaaaccggaatcatcggtctagttctctacctggctgttcacggagtcctttttgcatggtgcggatggatactgatgttcaagatcatgaacaaacgcctgcgaggcttacttactgcctggctctgtaccgctgccggattctatctggcagcctatgccaacgacgtgatgcaatatcccaactccatccccatatacacagcctttgccctctgcttcgcaggaccgtacattgacaagcggatgcagcaaagtaaagaaacagaactgaaaaacgaacaatagattatgatgaacgaacctcaagtctcctttatcacagtttgctacaacggctttaaagacacttgcgaattaatagaatcgctgcaaacacatgtacattccgtgagctatgaaatcatcgtcgtagacaatgcttcgcgcgaagacgaagcgactaaaatcaaggagctatattccgatatagtcaccctgcggagcgagtctaacctaggcttctccggtggaaataatctggggatcagagtagccaaaggagcctatatctttctgataaacaatgacacttatgttgaatcagacggattccactacctgacagagcgactggaaagtcagaaaaacatcggagccgtctctccgaagatacgctttgcctttcctccgcaaaacatacagtttgccggattcacctccctgtcggcaatcactatacgcaacgaaatgacaggtttcggctgtccgaacgacggcacgttcgacaccccgcacacgaccccctacctgcatggggcggcactcatggtaaaacgtgaagtcattgagaaagtaggagaaatgccggaaatattcttcctgtattatgaagaaatggactggtgtacacagatgacaaatgccggttacgaactatggtatgagcctcgttgcaccgtcttccacaaagaaagccagagcaccggacagttcagcaagctacgtaccttctacatgacgcgcaaccgtttgctctacacccgccgcaaccggaaaggtgctcaacggctgctctccattctttatcaatctaccatagctgccggaaaaaacagccttcagtttgccgtgaaaggtcgtttcgatttatttgccgcagtatggaaaggcgttgtcagaagcttttctgtcacctctcctatccgataacccttaaaatgaaagaccatgtacacctttattgactggattctctttattcttctggcactttgtgtcggttatctgctcttctacgccattgcctccaaattctatcgtccgcgaaaactttccgaagcacgtatcctgcgtcgttttcttgtactcttccctgcatacaaggaagacagggtgatcgtctccactatccgtagtttcctcgaacaggaatatcccaaagaaatgtacgccgttcttgtcatctccgatcagatgcagccggacacgaatgctgccctacaaacactccccatctgtttgcaagtagccgactataccaatagttccaaagccaaagcccttacgctggcaatgaacgtcactgccaacgaatcttatgacgtagtagtgatcatggatgccgacaatgtaacgactcccaatttcctcgcagaaatcaaccgtgcttttgagtccggcctgcatgccgtacaagcccaccgcacaggaaaaaacatgaatacagacatcgctgttctggatgcgatcagcgaagaaataaacaacggattcttccgtagcgggcacaacgcgataggattgtcagccggattagccggttccggaatggcattcgacgttcattggttccgccgaaatgtaggacatctgcaaacatcgggcgaagacaaggagctggaagccctgttgctaaaacaacgcattcatatcgaatatctggaacaactgcctgtatacgatgaaaaaacacagaaaaaagaaggtatcaaaaatcagcgtaaacgatggattgcagcacaatacggtgcattgcgggcttccttgcccgatttcccgaaagcactgattcagggaaatatcgactactgcgacaagattcttcaatggatgctgcctccccgtctgatacaactggcgggagttttcggtttcactttactctttaccgcaatcggcttactaatgagtctgcaaagcggaggatacgaatggtatacagccatcaaatggtggatactgtcagccgctcaagttgccgccatgatcatacctgtgccgggaaagttgctgaaccggaaattaggaaaagcaatcctgcagattccgacactggcactggcaatgatagccaatatgttccgactgaaaggagcgaacaaaaagtttattcataccgagcacggagaagaataaagcctcaccgtgaaagaaaagaaaaggcacagatgacacgaattaacacggatttggctgcgcagcctctcaaatccgtgttggcgtccgtatcatccgtgcctaaaatttccctatgaaaaccgtgcctgaatcatattcattagcaagtttcgtcaagcccactcctcctccgcatcaaagcacggacaagccttcacccattcctccggctcgatctccccgttcccgttcagatcagggctcaggtcacgatgtccgcacacccggcaaccgggataatcacgcaacaacgtaagcacaagcacatgcatcgagtgtatctgccattcggtacgggtatcggcaggccgcccgtgacagtcaagtccgccctcatagcaaataccgatacttgtctgattaaagcctttcgcatgagctcctatccgttcaatggggcgggtagtcttgatgtctccatttttccggatataaaagtggtaaccaatcccgttaaatccccgccggcggtggcacacttcaaggtctgtttccgtgaaatccctgtccgccctagaggcggaacagtggatcacaatcaggtcaatcttcctcatcgacctgccctttcgttcgttttccttttctcttcctacggaagaaaaacaggatttccaatgcaatctccaaaatcttgtcaatcataactttttacttttataggttattcatttacaggtagtactcattcaatgatgctgatacacttaccggactaaacggtaggatcgggagcttcctcctcccctccatcgccaccggaaccggaaccgccaccggaaccgctgccactaccggagcctccgccatcaccgttgcctcccgaagccggcgcattcttggagacaagttcgaagaccatgttattgtccccgccacgtgtggttgccgtactgtcgttggcaagccgcagagcattatcgaccttgaaacgaaggttgacacgagtgatattcctcaccgtacagtccttttccagttccacaccgggacaagtaagcgtggtatagaaaatccccaagccatcaacttttaccttattccccgctacgagcaccttcttcatcgaacggacaaaggattgcatcacatgctccacatcttccaccgaaagcgaaccgatcgactcgatctcacgtgccagcgactcgatagaataaagtttcgattcccccggcttgggtttgagcacatacaccatcggcgatttgtcgtcaccaatcttttttttgcgctgatagcgcaccacagacactgttgccatactgaatttgtattaaagaaaagaaggacattctccctttctgttggtgaaacaaagatacggcagcgcaccggcgacttcccggattacgacggactgcgccggactatgacgggataaaacggattaagacggattaaaacagcataaagcagaataaaacaaaataaagtgaatcagaaacagattgaaagcatactaaaagcaaatacaaagtaaccataaagcagataaaactgaaaaagatcctaaccaaccccgaataaacatccccccaaaagataagcagacaacgtgaataacaactaaacaatacaagcataaaagcgacactttcatgagcaacaaatttgctaaatacagtaaaaaacagtaactttatacccattacaacaccctataattaaatcaagaatgaaagcaaatacagataccctgcaaaaacaggaagaagaaaaagccttccaataccgcagctacggaaaaggagaactcgccatgctatatatccccaacatccagcaacaaagcgcagtagaccgcttcaacgaatggatcgaagccgcacccggactaaaagaacgcctgctatccaccggaatgaatccccgaagcagacactacacacccgcacaagtacgactgatcgtagaagtgctgcaggagccttgaaaacaggcaacaagtattgctgccaatcagcagttaaaacaaaataagaatagttccggacaagatacccgattaatgtataaagctgtccgaaaagaagataaatactatcaatctatcattcagcacacggagaagaatctcttctttgactaatataaagagctgattcttcggcagacttaggatgacagagcaaaacgatagcagacgttctcttttcggacaactccattcaatatcattttccggttcactcggatgaacacgttgcttttcagccgtgtctcttaatgaaatttctgatcttcttcgataagttcctggctaaatttctccggtgccaaaggggtaaagagttctataagattttcttcgggatcgcgcaggtacagggtacgcatcccccaatcgggcatatccgtaggctcactgataaatgtcacgccttttgctttcagtgcgacaaaggtttcgtccacgttatccacactgaatgagatcattaatttttcacgcatcccaataggctgctgcttatctgcattacctgccgaaggcgccatccagtcggatacaaaaagggcgagaccttctattccgtcggctactttaaaactggcgtatccgctattctcatctccccaggccggctctaatccgagttgttcggtgtagaatttgaagcatccggcgaagtcctttactaataatcttacgttactaaatctcattgtttacagattaatggtttattatttgtttcttagaatcgaaatgcaaatataatcattctatcggatgacgtttcatgaatccgtatttacctcaaaactgtgcgaaaataaagtaaaccggtatcaaaatgaatcaccattcaaccagtgatccgcaccgttactcatcccccgtgacctgttacccaccaccctcctcaccagctacgattattacctattacttattacctattcaaacagctccttctccggcaaccagcacgagctgtcattgacagtgtttctgacccgttgttccggtgggacggacgggtcttgggactcttcgcaggggaggtaacgtccgctgacgggatcgtagacaaaagtagccacaccacctgctccgaggtgtttgaacttcactttttcgacatagacacgtgtcactccgacctccttgtcacgctccactaccaagccataatccgccttgttgaagaaatcggcagacccgtttacgtcgtacatttccggacgcggagtatggttcgtcaccggattgcggttcatctttcgggggtgcgccacaagaatcaccagacagttatattgcgtggcaaactccgtaaacagattcaggaaattggaaagatactgcgtttccgattgccccggcgcgggggtatgctcgaaacggttgaccgggtcgaagacgaagatgcggcatccccgacgcaggacaagctcacgggctttggcaagcacccgttccggagtggcgctgcctttgagggcgatgtgacagacgttttcggcaagaaactcttccgaacggagcagaagtccttccgtcatgccgcaaccgttttgaaaacggcgtccggtcagtttctcgatcaacttgcggagatggtagacgataggattattctccggactgaaaaacgcaatcttccactgatggcgcatacagaggcgcaacaccagttcgtccagccattccgattttccggcccccggtatgcccgtaacgatgaccaaccgtctacgttcgtacgtacaaatcttatccatctcctcccagcccgtctccgctccgggaccgaagccgttgtcgaacaatgcccgcaggtcttcgtgcagatcggcggcggtgaagatgccttcaagagggatttcttccgcctgctcgatggcgatgcgaaggctgtcgatcccatatttgacaagatgttcattggcatccttgcaccccggtccgtagacggccacacggcagcgttcggcacccagacggttgaccagttcgtcacgcagtttgagcccggcagagtcggtgtctacggctatgacgatgtctttcagattttcgaagtgcgactccatgaagcggtcgagccacgaaaggttcgcatttgctccggcaggtacggagatcacgcttttgaatccggcggcaagggaggacgcggcatccagttcgccttcgtgaatgatgcaggtgtcctgtcccagcacggaatcgatattgtagggaatcagttcggctccctgcaccattttgaagtttttggcaccgctgcggaatttggtgttgacgagtttcccgtcctcaaaataattgaaacagacgcaccgctctttcgtgccggattgcgacatgaactcttcctgctccgtgatgcgcagaccgacgatgacggactgcggaatgcaacgcgtctctaccagccaacgctccgtagcttcggaaagcgtcgtcttcgaagcgtcgaacaccggacggtggaaatgctggggaacggcagatgccacacgacgtttacgggcagcctgtcgctcggctttctcacgctcttcggcatcgtcggggacgtagaagtcagctccgcaatggtagcaatggcaatgtcctgtgtcgatattgacccgcagcgaacggtcacgcttgttgtgcctcgtcgggaggcattgctcgcaaatggttttaacgacaccgctggtatgcctgcggacatcgacatgataattagcaaaatttctcatatttcttgtttctattcctcccttccgaaaaggagattttaagtttgtattaataatttttctatcagttcccaatgcagacagaaagctaagcatcaatgggcaccgggctaaacaccaataagcagcgaactgaacatgaatgagcagcgaggcgagcatgaacgagcaccgagctgagcatgagcgagcaccgagccgagaatgaacgagcaccgagccgagaatgagcgagcaccgagccgagaatgaacgaacattgagctgaaaggcaacgctcacgtagccggatgtcagagagatccggagctaatttccccacttccaatgcacttcatcccacacggcagacctgtccggtcttggaggcgcatccttcggaatcggatgtccaagatacgtccgctgcccgccaatgagttgttcaaagcgatacagttcttcctcagccgattgccggcaactgccgagcagccttttcttcagctcctgagccggacgtccgcccggagagaggtaattgccgaaatacagtttcacatccctcaaaaacagcaagccatcttccctgccaaagcgtcggatatgctctttaaaagcagtgatcacctcctcctgccgctccacgaaaagtttgcccatgcaggaatgcatagccatcgactccatgtaactttccgattcggccatctgatccaccagcatctcccacggaagaaccggctgtaggggcaactgtcccctatcctccggtggaggaacgatctgaagtccgtcagaagcggcggcggcagaattttctttctctgtcttttcttcgttactactgttgttgtctttgacaacagtagtaactcttctctcctcttctctactcttctggttttgattcggtttttcgcctttatccatcggtgtttccggcgtgctctccatgcgtttcggacgacctccttttttgccgttcgccacattaatcatccgtctttcttcgagcttcgccatcaccctgtccagataaggcgaacggaacatttgccgttcttcgtcgagcacaaaaaggtcgaactcacggagcaccctttgcaacacaccggcatccaagtcatacatccgcgcgaaagcccccatacaaagcggacaacaggatgcttcataattgtccgctttgcgcaaatgcgtaagaagcatcatatagattccgagcgattgcgcagcgtcaagttccatcatcatcctgacaatattgtcattactcaaaaaatttacctctaaattgaaatactgatctttcttcatatcttacaattaattgactgtgattcagaacatcccgaatccgctctgcaaaggtctgaatacttttccgaaaaactacttgcagaactgcaaacgatgtttgacatttttctatgaactttgcggcataatttgtaaaaagatagataacatgaaaggatacgaaagagcaactaaagaagaaattaacgaccggctgcgtattgaagaaaactgtcatgcacaagttgaacgaatcatctacatacgtcacctgtgtaatctgaaacttgaagaggcggcagatgtgaccaatctcagcatatctaccctgagccggtacgaaaacgaagtgaccaaatgcagcgtacaaagtttcataacgatatgctaccactatcagaagtacctccataagcggcatatccccttcgacaggagcctgtttctcatagatatgaacacgcttgacaactaatagagtaacagagagataaaacggacgcacaaggaataaaggcacaacaccgaaaaaaagcaaaaaagatgaaaagtatcatatcttttattacctttgtatgtggcaaaagcccaccaaaaacaaagaatcaagcatgaacgacaatgaaataggcaatccaccgataaaagcattaatcgttttcagagagaatggagatacggacaatctttttgtccccattttatgcgatgctatcaggacgacggggattgacgtacgatgttccacgaatgagttctggaactcggatacaccttacgacatcatccacttccaatggcccgaagaggtgatggaagggaattgtgacgatccggacaggatttgccgcctgaaggagtgtatcgcttttttccggtcccgtggggcccggttcgtgtatacgcgccacaatgtccgtccgcatgatgcgaacgaggtgatcggccgtgcttatgacattatcgaagaacaaagcgatgtggtggtgcacatgggacgttacagtctcgacgaatttgcagccaaacacacggacagccggaatgtcatcattcctcatcctatttatcagtacacatacaaggaggacatcagcgtggaacgtgcgcgccagtatcttaatctgccgcaggaggcgtttatcgtcacgtcgttcggaaagttccggaatcgtgaagagaggcggatggtgaccggagcgttccgaaaatgggatgaagcaaagaagttcctgcttgctccacggctgtacccgttttcgagattcaacaggtatggcagcaacttcttcaagcgctggacatcccgggcaggatattacctgcttatacccttgctcaaccgcctgcgcagaatgcacgccggagccagcgacgaacctatagacaactgcgacctgccttactacatggccgcttcggatgtaatattcatccaacgaaaagatattctgaactctgccagtatacctctcgccttcctttttcacaaagtggtcataggtcccaatatcgggaatataggagaaatcctccaagatacgggcaaccccgtcttccaccccgacaaccaatttgatatcatacgagcactggaggcagcccgccaactgtccgcccgaaggaagggggaagacaactatgcatatgccatcgaaaacatgaacagcggaaaaataggaaaagaatatgcggagctttacagaaacctagccaatctctctctttaaacgatctcaaaaacaaacaacaatagagtagccatacacagaatttatggaaaataaaaaaataaaagtcagtgttgtcatacctgtctataacaccgaaaaatatgttcgggaggcagtagaaagcattatgaatcagacactgcgggaattggaaatcatcatcatcaatgacggctccacggataacagtctgcaagttgtagaagaactggctgcggcagacagtcggatacaggtgtattcgcaaaccaaccaaggattgtcaatggcacgcaatgcaggcatcacgcatgcccacggaagatacatctatttcatggatagtgatgatctgttggaaaaggatgcaatggagttatgctataacaaatgcgaagaaaaagaactggatttcgttttctttgatgctcagagcttttttgaagagaatattcgcaatgctcccgtactaaattatcaacgtaccgataagttagaagacaaggtttatacaggtcccgaagctatcaacatacaattgcagcacaaaacgtacaccccatccgcctgcctgaacgttatccgcacagcttttctggaagaacggcagctcctcttttatccggatattgtacacgaagatcagctattcacgaccttactttatctgcaaacccgaagaacaagctgtatccaacgatcgttctttcaccggcgcatacgtaaaaattcaattatgacatgcgatttttcactcaaaaatttaaaaggatatctcactgttgctcaagagatagtcaaattcaagcatcaaacctctgaatacaaaatcaggaatactattgatttatatctgtcgcaaatgctgaatgctgtcatttggcaagctcatgtgctctcttacccgtaccggcttcggctggcgtggcggtgtctgtttagatacaaaaaactcatatctataagaagcatcggagtcttgttattcaaaatccatcattcataagtagaccagaaaagaatcattcaggcaatggcaaacaatattaaacatcagttattttccggagttttctacacggcactagccaaatacagcggaatcattatatcactcgtcgtggcagggattcttgcgcggttgctctctccggatgacttcggagtagtggcaatcgctacggtcattattgcatttttcaatctctttacggatatgggaatatcgcctgctatcgtacaacataaatcattgactaaagaagaactatcggacatcttctcattcaccgtatggacaggcatcggaatcagcatactcttttttgccgcttcctggctgatcgccgattactacgaaagtgggatcttacggacgttgtgccagctcctgtccgtcaacctgttcttcgcctctgccaacatcgtgccgggagccttgttctaccgcaacaaagagttcaagttcattgctatccgaagctttatcatccagatagccggaggtgccggagcaataactgccgcgctttgcggagccggtttatatgcgctgatcatcaatcctatactttccagcatactgatattcgttatttcctatcaacgctatccgcaacggctgcgtttcacgttaggactgaaagtactccgaaagatattctcctattcggcctatcaattcttgtttaacgtgattaactacttcagccgcaatctggataaactgctgattggtaaatatatgagcttgtcagcactaggatactatgaaaagtcctaccgcttgatgatgctccctctgcagaatattacgcaagtcatcacaccggtaatgcaccccatcttcagcgatttccagaatgacaaggaaaagctggcaacatcctacgaacgcattgtccgttttctgtcattcatcggtctgccactcagcgtactgcttttctttacggcagaagaagtgacattgattatttttggtgatcaatggctgccttcggttcctgtattccggatactgtcactttcggtcggtattcagatcatactctcctcttcaggctctatttttcaggcagcaggtgatacaaggagcctttttgtctgcggactcttttcgtccatactcaatgtgagcggaatgctggcagggatattctatttcggcacactgacagctgtagcaatatgtatcgtgataacttttactatcaatttcgtacaatgctattggatgatgtatcgagttacattccaaagaaacgcatggatatttatcagacaacttctttctccactccttgtcagcctactaataacggcattcctcacgcctatatattatatgatggaaaatatgaatattttcgtaacacttattgcaaaaagtttcgtaagttttattatctttggaacatatatgcaagtaacacacacctatgatatcacaggcaaagtgaagactcttgtaagaaaatagaaagttggtacaaaagaacaaacaatgaaaggattattcctcatattccatggtttcgaagcattcaacggaatcagtaaaaagatacgttatcaagtaaaagccctcaaagaatgcggactagaaatgcatacgtgttggctagacgatacggacaaccataaacgccgtatggtagatgaatcgataattgccgactatggtttcgggatcaaaggaaaaatcctaaaaagaatcgaatttgacagtatcgtacattatgtacagaaagaaaacatagactttatctatgtacgctatgtccataatgccagccctttcagcatacggctgatgaaactactaaaaaagaccggagcacgtatagtgatggaaatcccgacatatccatacgaccaagaatataagggactcccattcgtataccaacgaatcctatttatagacaaatgtttccgacagcatctggcacgctatgttgacaagatcgtcactttttcggactatgacattatttggaatcgccccaccatccgcatctcaaatggaattgatttcagcgaaatccctttaagaggtccaaagaatgataccgcacattctctacaactgattgccgtagcgacaatgcacccatggcatggtttcgacagagttatagccggcatggcaaattactatcgtacacataccgacactcatgattataaagtatatctcaatatcgtaggcttcggggttcccgaactggtggacagctataaaaaagatgtagccaaacatcagttagagaaatatatcatctttcatagtgccttatacggcaaagaactggatgccgtgttcgagcagtcggacatgggaataggcagtctggctcgccatcgtagcggtattgacaaaattaagaccttaaaaaaccgtgaatatgcagcaagaggcattccttttgtttattcagaaacggatgatgactttgagcatcaaccatacatacttaaggcagcaccggacgattcgccccttgacatcgaaaaagtaattcgcttttatcaatcattgaaaacaacgccgctccaaatacggatgtctatagagcaatcactttcatggaaagcccagatgcaaattgttattaatgaaacctttgaataaaactatatcactatgaatatacagccactgatcaatgctatccgctataaattgcgttatggcattactgtagaatggtacaatttctggtacatggctctcagatgccatcagaaaataactccgcaggtagcttccattgatgagaccattcggataatcgtagaagaccaatgttccgtgagccgtttcggcgatggtgagatgctgcttaccaacccggacaaggaaataggattccaaaaaggaaatgtactcttggctcagcgtctcaaggaagtattgacaagccatgaagaaggacatttggtttgtatctccgatactttcgaaaacatttatcgctataaccgcaaagcacgccgattctggagaactcacttctttctgtatggcagttggtgggaccgcttgctgttgcccgacaggctatactacaatacattcatcacccgtccctacatggacttcgcttccaaagaagactgcccacggtggtttcaccagatgaaagctatctggaaagacagggatgtcgtattcattgaaggcgaaaaaagccgtttgggggtaggcaacgacctctttgacaatgtaaaaagcatcagacgtattctttgtccgccccgtgacgcatttgaccgctacgaagaaatactgaatgaagcgcaaaaactcgagaaaaccgctctcttcctgattgctttaggacctacggctactgtactggcttacgatttattcaagtccggttatcaggcaattgacgcagggcacgtggacgtagaatatgaatggtggcgaatgggagccaaacggaaagtaaagctggaacgaaaatatgtaaacgaagccgccaacggaaaacaagtgtccgacgccggagaattttatcggaaacaaatcattgctaaaatctattaaatcatgaagatagcctattacctgccctcactacaggcacctggcggaatagaacggatagttacattcaaagccaattattttgcagaacattttgaaggatacgacatcaccatcattacatccgaacaaatgggtaaagcaccacactttccattatcccccaaagtaaagcatatcgacttaggagtatctttcgacctgccctactctcaatccatagtaagtaaagtgctgaagtatccgttccgctactatcggtttaaacaacgactatcgaatctattgaacgaactgaaaccggacattactatctcaaccatgcgccgggaactgaactttatcactaaattgaaagacggtagcctgaaaatcggagagtttcacgtcagccgctacgcctatggcgcagaagcactgaaacgtaaaagcccgattgtcaacatgataaagaaaagatgggcaaacagatttgtcaaaaacctgtctaaactgtccagagtgattatacttacaagtgaaggagctaaagactggccggaactgactaatatcagcatcatccctaatcctatttctactcctgtagaaggaaaacaaacagatattctgtcacataatgctattgctgtagggcgatatgcgccccaaaaaggatttgatatgctaatccccgcctggagcattgtcgcccaaagacatccggactggaaactacatatttatggagaaggcgacctgaaagagaagttcaccaaactaatagatgaactacaactaaataataattgtctgcttcatcacactgtatcgaatatagccgaaaaatactgtatgagttcgatatttgtcttatcaagccgatacgaaggttttggactcgttctggcagaagcaatgtcatgtggtataccctgtgtctcatttgactgtccgcatggtccttcggatattataaaagactatgaagacggtctactagtggagaaagaaaatatcaaggaacttgcagacaaaatctgctatctgattgagaatgaaaatgtacgcatcaagatgggacacaaagccagggaaaacgtaaaacgctttctgccggaaaatgtgatgccacaatggaaaaacttattcgaatcattaacttattcttctaaataacagaacaacatatggtaaagtggtataaaacttatctggaagtatacgggaaatcttttgatgagatttctgacgatagtatccgcaaagtcaaaagacaactcaaagaacgtcaaaacgattctccactggtatcggttgtactcattgcacacaatgaggaacgtcatctgataagttgtatctggtcactctccgagaatcattgccatttccccattgaaataatagccgttaacaacaattcaacggataaaacggaagaagtattaaaatcattgggagttacctattataacgaaacgaagaaaggtccgggatacgcccgccaatgcggattggaccatgcaaaaggaaaatatcatatttgtattgatgcagatactttatatccaccgcattacattgaaacgcatgtaaaatatctaatgaatccgaaggttgcatgtacattcagtttatggagttttatggttgacgaaagacattcccgattcggactatggtgctacgaaggcctgcgcgatatatacctccgcttacaagccatccagcgtcctgaactctgtgtgcgaggtatggctttcagttttaatacggaaataggacgtcggtttggatttcgtacagatattatccgcggagaagacggttcgttagcattagctatgaaaccgtatggaaaaatcgtatttattacaagtcgcaaagcacgagtgcttacaagtaatggaaccctaaattctgaaggatcactgattgataatatatggatacgggtaatcaaagcactgaaagaaatcaccggactctttatcaaaaagacggcatacaaagataaagactctaatctcatcaaataaggtctcatcaaaatcattatggatatggcaaaatatatagtaaatatcatcttagtaacagcttgtcttttcacctatacttcctgtataagaaaaatgaatttatacgatgagaatagaaatacaggacaagacaataacgaaaaagatacagattctactcccgtctatatgtatcctttcgacaaagaaacagcaaacgttacagcagaaatcattatccacacaaaaaaagaaatacagaccaaagatattaatgtcgaaatccctcatttaaaatacaataagacatggatgttgatgctaacacaagacgactgcatgcaggctgctttttgccgtacgtgggctgcaataaacggtaaaccgatctcaagttcaataccttatcctactccaactcccactgatcagaatatgaaacatcaattatattttgacatcaaacatttgcaaaaaggggatcttccccctactattatttccgccaaccaatctttgggatgtacagacggagcaggaaatgaagttcggtttgctattactaccactcttgcccctgaagaaaaatggatggatgttgaaacaaacgtactgccggggtttactgcaaactattatcgtttttatatgaaatccggacttatatgggataacatacgagagatgttgaactatggaacaggcattgccctccatgatgtaatgacaaaagatgctaatgatccaatacaaatattggaacattttgatattgcccaaaacattattgtagagaaactcacaggaaggggatgtaaatttcttgctgaacccaatggaaataaaacatacgtaactgctgctcttcaatgtccggaaattcaaacgatgaccgcacaagcaggagcaattaccctatatccgtatcaagtgtctgaaactttacaaaaatctctgatagaacgggagtttaacgattcaccagcatattttaaacaacagattactgacctgctaaaattacccaaagaagaacgtaaagcaatctgcataggtgttcatggtacggacaacaattggatcgactttttattatggttaaatagtaattatggtaaagatggggatgattcgttatggtttccaagccaggaagaatattatgaatataactattatcgtttaaacagccatattagtatagcacaaatagacgcaagttctttcaaattaacagtaaatttaccgggagaaaagttcttctactatccttctaccactatcaatttgccgggaattagcatgtatgacattgtttctatcgaaggaaatgatgcattgaccggactatcttatgctgactacaaagacggtatcatgctcaatatcgactgtcggaaatacctgtttgaacacgccgagaatttcgtaaaacgatacgaggccaatccttccgatgcttccaacaaagcagacgccctctactttgtaaacatgctgaaagaatcggctaaaaaagaggcactgaaaaaacgacttcaataagtaaatcaacaaacatctattaaacgagaatacagctatgaacgaaactctcatcctcgaaatcatcttctggttcgccctgttcatggtgttctacacctatctgggctacggcatcgtcctctacgccctcgtcaagctgaaagagcttttcgtgaaacccgtgaaacgggtgctgccaccggacagtgatctgccggaagtaaccctcttcatcaccgccttcaacgaagaagacgtggtggacgaaaagatggagaacagcctcgccctggactaccctgcggacaaactccgcatcgtctgggtgacggacggaagcgatgacggcacaaacgaccgtctccaaacccactggaacggaaaagtaaccgtctacttccagccgaaacggcagggaaagacagccgccatgacacgaggaatgacactcgtccggaccccgcttgtcgtctttacggacgccaacacgatggtcaacagcgaggcaatccgtgaaatcgtactggcttttcaaaacccgaaagtgggctgcgtggcaggagaaaaacgtatagccgtacagacgaaggacggagcagccgccggaggcgaaggcatctactggaaatacgaatcgacactgaaagcgctcgactcccgtctctactcagctgtaggcgctgccggagaactgtttgccgtccgccgcgaactcttcgaaccgatggaaccggatacgctgctcgacgacttcatcctctctctccgcatcgccatgaaaggatacaccatcacctactgcaccaatgcctacgccatcgaaagcggatcggcagatatgggtgaagaggaaaaacgaaaagtgcgcatcgctgccggaggattacagtcgatctggcgtctgctcccgttgctgaatcctttccgttacggaatcctgagttttcagtacacgtcgcaccgggtattgcgctggtctgtcactccattcctgctgtttgcgctgttaccactgaatatagtcgttttgctattgggcgaatctcccctgttttatggcaccctgctggggttacagattcttttctacggaatgggatactggggatattacctctctaccagacaaataaagaataaaatactgtttattccctattatttcttattcatgaacgtgaatgtgctcaaaggaatcgactatctgaaaagaaaaaaaggaagcggcgcctgggaaaaagcaaaacgtgccgaaaaataagaacagagaatcaaatattttgctatctttgcatgaaacagaatcttataaatctaatcggacaagcatgaacagaacattacatgaggcagataatgcgcagagaatactgaagttgaccgccgacaccatgctattagtcgatagaaatggcatttgcattgatattgatattcatagcaatttatggtttttacaagaagagaggctcttaggaaaaaatatattcgaacggatgcccgaacacacccgtgagaaggtttacagcaccttccagaccgtgcttcgggaacagcgaagcatcagcaagaactacaagctggaactggaggataatacctattatttcaagtgtatcatgtatccttacgatgacatggtgctctgccaatatcgggacatcacccagcgaagcaacgtgaaacgccagctggaacaggtgaaccgaaatctgagggagatacagaaagtggctcagatcggacagtggatgtacaacacccgcgacaatgtcttctattacatgggctacaccggagtattgtgcgaggaatcttccagaagtatctctctggagaaatatcaggaatttatcgtcgaagaagaccgcctgagcttcaccagctggtgccggaagaatgaggaaggactcaacgaagaaagtatcagctatcgggtccgtgtcgccggagagatttactatatgcgccttcaggcttatctgcgagacgaactaccgaacggcagctgcaacatcgaaggttacatccagaacatcaccgacatacagcgtcgcagaaacgacatcaacacgctgacgcacgccatcaacaacgcaaaggagagcatcttcgccgccaaagaggacggtacgctgatcttcgccaaccgccagttcctccacaaccacggcatcccggaaagtgaggagatcggcaaactgaaaatctatgaaatcgccggcgatatgaacacgcaggaagactggcatgaacgctgcaaggatatcctgcacggaggaagcagaagtttcgtcgcccatcatccttcgaaggtcagcaagaatatattggcttacgagggaatcatgtacaacgtcaccaatgactccggtgaagaaagttactggtcattctcccacgacatatccgagcgactgcactacgaagcgcaaatcaaacgactcaacctgatcatggatactaccatcgacaacctccccgccggaattgtcgtcaaggagatcaacaacgatttccgatatatctaccgcaaccgggaatcgtacaaccggaatctgtgcatcggcgaatctatcggcaagaatgacttcgactactatccccccgaagtggcagaaaagaaaagggaggaagatacactagttgccaccaccggacggggactgcactggacaaccgaagggaaagacaaaaacggaaacgagatcatcctcgacaaacggaaaatacgggtggacggagacgaactttcctcccccatcatcgtcagcatcgaatgggacatcacggaactggagaagatcaaacgggaacttcagacatccaaagagaaagccgaaatgtcggacaaactgaagtctgctttcctcgccaacatgagtcatgaaatacgcacacctctgaatgccatcgtcggcttctcgcatctgatagccgaaagtgaaaataaggaagaacgtaaaacattttatgagatcgtcgaagccaacaacgaacgtctgctgcaactgatcaacgagattcttgatctttcgaagatcgaatcgggcattatcgagttcaccagcgcaccgataaatatcaacagtctgtgtaaagaagtacatgacgctcacgtatttcgcacgccgcaaggggtacaactgatctacgagccatccgaaaacggactggtgatagagactgacaagaaccgggtgttccaggtgttctcgaatctgataggtaacgcattcaaattcacgaaagcaggcagcattagttacggatataaactggtaggtaatcagatcgttttccacgtgactgataccggtacgggcatcgaaccggagaagataggacgtgtgttcgaacgtttcgccaagttgaacaactatgcgcaggggacggggctcggactgtctatctgtaaaacaattgtcgaacggctgggaggtgaaatctccgtttcttcggtggtaggtcaagggacgactttcacgttcaccctgccttacgagtcggaacaatcgaccgacacgggttctataaagattgacatggcttctacggagacgtcagtagaaacgtctgtcaaggaggattctgaaaagacttccggaaatacggacgataatagttccgatagtatttccgccaatgcctctccaagccagcggactattctgatagcggaagatgaggacagtaacttcgatttgctgaaagctattcttggaagaaagtacaggcttatacgtgcacgggacggtatggaggccgttacctcatacgatgaagcgaagccggaccttattctgatggatatcaaaatgcctaatctcgacggtctggaggctacgaagatcattcgtgagctctctcctactgtgcccattatcgcacaaagtgcttatgcttatcaacaggatcagatcgctgcaacggatgccggatgcagcgacttcatcgccaaaccgatctcgcaagcgaagctcaaggatatgattaataaatggttaccataaaatgaaagccttatatagattactttactacctgtctatcctgctgacgagtattctggcaggtttcacattagccggagccttcgccggagatgcttcgccggagggctttaagctgatgccctttatcggattggttctgccgatacttttgctggctaatgtcgcctctgccatctattggacggttcgctggcgatgctgggttttcattcctttaatcgccatactgggaaatttggggtatctgacccgtgtcctccagtccccgcttttcgattcggcttcccaaccgaatactgaatctctgaagaaaaacgaaagggccaccgaatcagcactgactattgccacctataacgttaacagctttaatcacgagcacacaggtttctcatgcaagcaaatcgctgcttacatgaaggagctcggtgtagatatcttctgttttcaagagtttgggatcaatcatgaatttggtattgacagtcttcgcaccgttctttccgaatggccgtattactatgtaccttcttctcctgccggagagagtcttttgcaactggctgtgttcagccgttatcctatcaaggagaagcagctcgtcacctacccaaattccaacaactgcagcctgtggtgtgatatcgacattaacgaccaaacaatccgtctgttcaacaatcatctgcagactacggaagtcagccgcaacaagcgcaaactggaaaaagaacttcgtgcggatgataccgaccgtgcggaacgtgccgctctcacccttgccgatggtctgcacgagaacttcaagaaacgtgccgcacaagctgaacatatcaatcaattgatttccgcttctccctatcccaccctggtatgtggtgacttcaactctctcccttcttcatatgtatatcaaacggtaaaaggagaaaaactgaatgatggttttcagacctgcggacatgggtatatgtacactttccgatatttcaagcatctgctgagaatcgactatatcctccattcgtctgagtttcaaggggtagattacttctctccggatttggagtatagtgatcataatccggtggtgatgagaatgaggttataaaccttacgctgtatatcactatatagaaaggctacaaaaaagccagttaactcattatgaattaactggcttcccattaaaataaaatccttctttttaactttaaaacttgtattagaaagtaacttttactcctaattgcatagaccatgcactaccaatggtattggtatattgccatgatgatctttctttaaaagcttcacgtgaattagcatttatctggtaagtcaagggttcaccaactttgctagcagtttttaataactgtacattgtcataactcttgagaccacaagattgatatgctccccattttgaattaatcatatttcctacattcagcatatcaaggctaacctgtattccatatttacgcccacctaaagttgcataaaaatcctgagcaattttaaaatcaaagcgattaatccaaggtgttaaagatccattacgttccacatattttcccttacgatctttaagataagaatcattgttcacaaaatcccaaaaatctttagcttgatctacagcagaataagtaatagcaccacttttatctgtaatatcaacaaaggtcatttcatcctgagagttaggcacgtatattaaatccgaataattgccatcaccattcatatcattataatatgtataggaataacgtcctgtatgatatcctgaataaaataacgagaacgttgtctttaagcatttagcataattaatttcataagaagcattagcaataatacgatggggcgtagaaaataaagaataagatactccaggatcattcaatgaatttactgccacattattttgccatgctgaattaggtgctgacccaggatttgcagtcagatctttagccattgtataagtatagccgatagaccctgtaaaaccaaaatcgtatttctttgtcaaaatagcattaaaagaatattgatatcctttatcttctccattagaaagttttactactacattcttaccattagtataatcattatactcgtatttttttgaagcccaataaatacgatccggttgttcattatacacacccgtaggctcagcctcattcatattgatctgcgcaacattataaatatctcttgtatacattgctccaacagataacataaaatcatacggcagttgaatatccacattcaaattactacgccaaacttgcggcatcttaaacttaggatctacatatgctataacatcaggtgcttgctctgaaggtgtagaaggaaataaactgggatatttctgcagagtttctctataattaggattaaaaccaaagtcagcaggtaaagagcccggatttttttgtgtattatactctaccatattttggtataagcccgaattacttggttgattagtgaaccatacaaaaggtaacaatccagtaaagattcctgtacctcctgatacaattacggagcgatcaccttttacatcccaattaaaaccgactcttggcgaaaacaagacttgcgtcttcggccacttagaaatatcgacatgagtattatttacaaaagctaattcctctattgacttgttagaatccaatgaattcatatatattggcatatccagacgtaagccataagtcaaacgaaaattaggagtaagagaccatacgtcttgggcatacacaccagccattccgaatgtcaactcagaacctggagcatcattaccattatacccatatgtaataccataaatggtaggtacttttccctgcataaaatcatccattgaatcataacgataatatccgtaagggcctctcaaataagaatttttaaaatattggcgctcaaaagaaacgccagcaagcaattcatgttttcctaatgatatactcacattatcaacaagactaaatacattattgataacctgattattaggagtaaacacttctgtacctaaagttatatattgctttccgtccttatatatatcgacaaaaggaaaatcagagcctttctgctcgcgtgtatcactaatatgagtatatgtggctaacagtttattctgaacattattcgagaaacgactatttaactcgcctgttatcgatgttactacgtttttcatcttatagtttgaattaccaaaagaaaaggcatccaaaccataacgattagaattagtactagttataatagtggacttagcgcttacttctctgtcatcttctgaggaaacagaattaaaacgcactgtcaacttatggttctgatgtatattccaatcaatacgagccattaacttccaattatcactttggaaattattgaagttctcatactgtccggggtcataatcatatttagttttaacaaagtcactgatagtacgcatatcacccacccaagtacgtgagatacgttttccgctatcccctgttccattttgatcttgattaggaagccaagttacccccggagtttccttattttcaatttcagcattcaagaagaagaaaagcttattcttaatgattggacctccaaaagttacaccatatgaatgagagttgtattcttttgctttaagaatatcctcaccgtcaatagagctccctgcaaatcctcttggtttatgataggtatatgcagtacccgaaaatgagtttgttccactttttgttacagcattaatagaagcacctgtgaagttggaatatttaacatcgtaaggagagacatttacagtaatctcatcgattgcatctaaagatatgggttgagaatctcctccaggtaaattattagaacttaatccgaaactattattaaacgaagcaccatcaatcgttatattgttataacgtccatcacgccccgcaaaagaactgcttccacctgcataaggagagagctttgtgaaatctgttatacttctgttaatagtaggtaaagtgttcatctgacgttcacttacattagtaacagtacctattttttcgatagtttttggtgctgttactactacttcatccaacaactctgaactttctttcaaagaaacattcaatacgtagttttctcctaatgacaactggatgcccttgtaaatggctgactgatagccgacataggtgatttcgactttgtaaggaccgcctgtacgcataccttgcagattgaattgcccactgacattggtcactgtaccatagcgggtaccggagggctcgtgaatagcaacgatcgttgctccaataataggttcatcttgtgctgttactttaccactcatacttgctgtggtaacttgcgcactcatcgtagcagtaatcagtaacattacgaccactaaaaaagaccgcattctcttcaacataatgtaatttattagttaatactaattgtttgtttcattgaaactgtgcacaaagataattaatattatttagacttagatgacaattatgctacattcttttaagagagataaacattttattgctttcgaaaacaataaaggccctgcaatgtttgcagagcctttcactttcgtatattaagtgagatttaacttgtaatctgtcagcaaatactagtcagtcattaggtttctataacgaacacgcttcggctcttcattgcctagacgcttcaatttgttttcctcatattctgaataggaaccttcaaagtagaatacattagagtctccttcaaaagcgaggatatgcgtacagatacgatcaaggaaccaacggtcgtgagagatgactaccgcacaccctgcaaagtcttccaaaccttcctccaaagcacgaagggtgttcacgtcaatgtcattggtcggctcatcgagcagcagaacgttaccttcttctttcagagcgatcgccagatgcagacggtttctttcaccaccggaaagaacaccacaaagtttttcctgatcggcaccggcaaagttgaaacgggacaggtacgcacgtgcattgatatcacgtccacccatacggatcaaatcattaccaccggagattacctgatagacgctcttgttcgggtcaatgtctttatgctgctggtctacataggatacctttacggtctctcctacttcaaactcacctttatctaccgtttccaatcccataatcagacggaaaagagttgtttttcctgcaccgttaggaccgatgacaccgacaatgccgttaggaggaagcataaagttcagatcatcgaacagcagtttgtcgccgtatgccttcgctacgtgttttgcctcgattaccttattacccaaacggggaccattcgggataaagatttccagcttctcttctttctccttcaagtcttcattcagcaacttgtcgtatgaattaagacgggcttttcctttcgcctgacgagctttcggagccatgcgcacccattccaactcacgttccagtgttttacgacgcttgctggcggtcttttcttccatttccatccgtttggtcttctgttccagccaggatgagtagtttcccttccaagggataccttcgccacggtcgagttcgagaatccatccggcaacgtgatcaaggaagtaacggtcgtgagttacggcgataactgtaccttcgtattgctgcaaatgttgttccagccagtcgatagattcagcatccaagtggttggtaggctcatcgagcaacaggatgtccggtttctgcaacaacaaacggcaaagagcgacacgacggcgttcacctccggagagattcaccaccggctgatcttcgggcggacaacggagcgcatccatcgcacgttccagtttactgtccagattccatgcatcagttgcgtcgatgatatcttgcaattctccctgacgggcgaaaagtatatccatcttgtcctgatcttcataatactcgggcaaaccgaatttctgattgatttcttcgtattctgccagtgcgtcaacgatcggttgcacaccttccattactacttcttttactgtctttgtgtcgtccagataaggttcttgtgccaaatagcccacagaatatcccggagagaagaccacttctccctgataggatttctccagacccgcgataatcttcaataaggtagatttaccggaaccgttcagaccgataataccaatcttcgctccatagaagaacgacaggtaaatgtctttcagtacatttttatttggttggaaagctttgctcactcccaccattgagaagatgatttttttatcgtcagccatatattaatgattgtatattgttgataatggcacaaagataagaaaaatgtttgaaatgctttggagttctaaaaaaatgttctacctttgcacccgcaattcgaaagaaagcataaaggattgattcagtagctcagcaggtagagcacaacacttttaatgttggggtcctgggttcgagccccagctggatcacggagtaaaaaatgataagagtaattcgagatttaatcgagttactcttattgcattataagatagtttattttaagatttgcatatttgtgaactataaaacctgttcactttatagtttccacaaccttctcctgtgtaataacctcaccatgcgatggataaaataaagtcacacctaaatttacaagttttctcaaactttgattgacttgtaaatagtcctcggcctcaatcggaaagggggctttccctagtagtttcatgctattcatattcattgccaagtcgccaatataagcatttccattatcaagcaatacggatatagaatcatgggagtgtccgggcgttaaaacaatttttccttgaacaccgatatttcttaaagaaacatcatcaatatctgaatctactataacatctgctgcatcgaaatcaattggtcgatactgatactttataaaaggacgtgagattctatctattatccatagtaatttattatattgctttaattttttataatctgtaaatccggctttcaaataaggtagctgttctttatgtacaattaattttgcctcagtcatttttctcaattcctgtacgatagcagcatggtcgtgatgatgatgagttaaaatgatatatttaatttgcacaggtgcaattcctattgaatgcaatttttcaagaaaaactcttagtagtccgttccaccctgcatcaatgagtaaaaatccatcattgcaaggtattagataatagtttgttgagttatatgttattttcatatcgagagaatgattatataatttatctataaccacaaaatacagcaatattaaagacaagaaccttgatctgaatcaagattttcactttaaaacaatttttctgcaactccgactttcagtttccgacattatcaatttagcattctctttatcaaccaaccctcaaaaggtactactatctttccgctccaaattccgaacggaagcactgcacaacagcaatataccagtaatactgatcgctatacctccgatagtaaaaatattctccactcccagcctgtcggctatgaatccggttaacagcaaaccgatgacagaaggaaactggctgatacttccgtataaagaaaagatatgtcccagataggaaggagcaaactgagtttgcagcaatgccgtaaaaggccctgtatataaaggtacgaccaaaccttgtatcatcgtcaacacagcatacgtaacaaaataggtggaaggcaacgctccgcataaagccagagacatgcccagtccgaagtatcctataataagcaagatcgattttcttattttaggattccacacgcccagtatcgaaccgccgacaagcagccctataccgaacagcatttctatcagactcacttgataaggagtaccattgaaatattgcaaagtcattagaggcataacagccacaatcggcataacaaagaaagtaaccgcaatctccgaaaccatcagccaactcattccccgattacgcaaaataatccgtgcaccctcatacatttcatgcaatatattcctattggtcccttttttggcaggattggggataaagacaaacagcagagagatgcaggccataaaagcaccagccacatccagcagcatcactacactcatgttgaacgccagcaacaaggcagcacccagcatcggtccgcaaattgtacacaccgactgaatcacttcattaatccctgcaatacgtaccagttcggaaggcggagccaacaaaggaattgaggatttcattgccggtgcatgaaaagcaccgcctatcgaccgcagcatcaacaacaaatagatagaccacagttctaccatatccaaatagaacagcagagcaatgaccgccgaacagagagcaacgaaactgtcagcacctatcatcgtccatttccgattccagcgatcgacaaaaacacccgccataggtcccaaaagtatctgaggcagtaacccggcaatggcagcatacgaaaggacttctgccgaacccgtctccataccgatccacagcaccatcgagaactgcgcaatcgaactacttaatatagagaacaattgtccggtccatataatgataaacttctttttccagttattgtttgttgttattgtttccatctttaccttatatattataaaagcgcggcaaagatacaactttaagaaatagcggaaatgaacatttgttaataaaaagatggctattccggacaactgtttactgaaaaaatagcttatttttgcaaagaatgcaagattagtcaaatggttgaatcagaaataaataaaagatattgccaaagctgcggaatgccgctccgcttcgacgtggaggaatatttaggcaccaactctgacggttcgaggagtgatgagttttgttattactgcctgaaggatgggaaatacattgttgatatatccatgtgggaaatgatcgacatctggataaaatatacagataaatataatgaatacgcagacacggactattctccgaaagagctgagggagatactggacaaacgccttcccacactgaacagatggcggcaaaagcaagagacaagcagccttcatcataagatgattcagaacataatagtgtacatcaacggtcatctgacggaggtactgaataccgacacgctgagttcgatgagcggactgtccaaatttcatttcagaagagtgttccgcaccgctaccggagagaatatcggcagttacatacagcgtttgcgcatggagcacgttgcacatctgctgatctctacggactatacgctaaagcaaatcatagagcaaacgagttatcagactaaatacagtatcgccaaagcttttaagaaacattttggtatatcgacttctcaatacagagaaaagcacaaaccgaacggtgaaaatccggcaacaaacataaaaccggagataaaagtgatcagcccgataaagatattctgcatcgaagtgggtgaagcgtataaaaacaaactaaaatacagattactttggaataaactactgcatcatgccgaacagtatgaagcagacccacgatatgacaagtttatcagccttagcatggacgatccgtcgattacgcctacggagaagtgccggttctatctgggcatcacccttcgcgatgatactaaagcgagaccggtactgggaatcatgcaaattcccggagggcgatatgccgtgttcagacatacggggaactattcttctttacacaaagtgtacaggagcatttatgaggaatggtttccgaaaagtaaataccatccccaaagcacattcagctttgagatgtatatgaatcatccgtccaccacggaaacgtcggaattactaacagaaatatatataccggtcatacggaaataatcaccattaaaacagaatctatggcaaagatatcagaaatcatgcttttacagcagccggaacagcccgctttggctattgaagtaaaaaccgacatgaaaggtatgtcacaggctatcggagagaattttgtaagaatagactctttattcaagaaacagggagaagtaaccacggatatccccttcgtagagtaccccgactttgaaagcctgaccgaagatcgtatagaaatgattatcggactgaaatcttcgaaacctttacagggtgacgaaaaaatacagtctgtcatcctccccgccagaagaatagtcgtatgtctgcatagaggaaattacaatgaactggcacagctgtacaatgagatgaccgaatggataaaaacaaatggatataaggcttcgggaacatcaatagaatattattacagcaatccggatgtacccgaagaggaacatgtcacaagagttgaaatgcctttactctaaaagcaagagaatagttgccgtaaactcttaccaaacaataagaagcagagaagccgtcatacagtatcaccttgtctgataaagtaccggcattccctgcttcaatagttctttagaaattagccttgcgtttcttcacttcttctacgagtttcgtaaaggatttctccttcttacgtttttcatgttcggaagcggagaaatgccatgcttctcgtttgagtttcagataactctcatataccttatgatctaacgtaccattatgtaccgcttctaaaacagcacaacccggctcgtcgatatgcttacaatcgctgaaacggcatgattccgcatagtcggatatttcaaacatttcggcaagcgaatcgggattgtcaatcgccaaaccaaattcccgaacacccggagtgtcgattaaaacacctgagccatccaccaataccatttcccgacgagtcgaagtatgccgtcccttccctgtagacaggcttatatcggaagtattcagtaccgatttcccgcaaagggtattcaccagtgaactcttgccgacacccgaagagccgacaaacacgaccgtttcgccttttgttatggattcccgcaaccggagaatcgtttgaggttgacaaatacttgtgataaatacaggaaactgacgggcaatgtgtttgatcgcttcatctattttctgcctgtcacaacctaaatcggctttattgagcaccaatactggtttgatattttcttccattatctgggctatgaaacgttccgctctgcgaacattgaaattatcatcaaggctttgcacaataaatgctttatcgacgtaagaagcaatggcctgccggtcggctaccgttccgttcttcttgcgatacaacgcccgttcacgaggcaacgtatcaactataatccctttgtttgcatcaaatggctgaaaaatcacccaatcgcccgtacaagggtattcatcaggcattctgccataaatcatatttcctgttaactcacacaaatatacgccatcctctgcaaccacttcataacaggttttatgtgtcacgatgattcgtccatgagacatatctttaaattgtgagatttgtttttgccggaatagattatcactccaaccatataatgacagattattattttcgttactcattatcttaatgtatatagcatacacgtgaaagcacaacaatgcttttgctattgtatgcgggtataaaaactaaagttatataatataggagaatcacttccggaaagattatccgaaagtatgaaagttcgaatctgttaaagtgaacagattcttatcagaccaaatccgatgtaataaatgatgagttaaacatccactagttttaatgaaacattataattttaatgcgtcaaagatatgggaaataaataacagaaccaaatgaatgatgaaatatgtgtcaaaagccaatggatacacggcctgacgtttccattttccattcccttgaattcttgtcgtactggtattccgcaccgacacttacttccgtattctttttcacatcgaccgagatagaagctcctacccctgtatgtggaaataacggattgtaaaccggaggaggtgtatttccccccataaaatattgtccccagacatttaaccggacatttctggctaaagaataatgcattctcgtatatattcctgctatgtcttgtctcgctataggcaaagccaaatagaattgccggcttaagactcctcccgcttcaacgaaaaatctttgagaaggaatccagcgcattccggcatttaccgctacatatttccccaatcccagataagtcttttgttctgcactcccaataaaggaaagctgtccattcatagaatgctgacgaaaattataaaaatccgtcaatgtcggattactttccagcaatgccggaaaatcgtaaaaatagggagataagcccgatgcaggacttgaaggtgtcagaccgtatgtctgcatggacttatcatctgttgcgagctttttagcctctatatccggtaacttcggttctatattttttgcttcgggcaactggtgtccgcttacttccgcagagctatttttcttttgcacatctattttattctccttttctatagtttgagaaaaggcagtagcaacacaagcaaaagacacaaaaacaaagacagcaaccgttctaatcataatattctcctttcttttatcaggggctatattatcaatacaattatccggttaaaagctcaatgatcggtaacatattttttattttaaagcagagatagattgatagacagcttttgccattacctgcgctcccttttcgttcggatgaatacggtccggaaagagttcgggcattccgtccatcgcagtatggaggtctataacagacaggtcgtttttcttggcgagcttcttgatcatcggaatgatttctttagagataatatcatcgttgatgccgtcacctgtaagataagctttggaaggatagcagagataaatcttcggctgtgaaggaaggcccttgaaagcgttgatcatggtctgcgcatctttcatgaagtctgctttgtatttccagttgaatgatttgctgtcgtttgttccgagtttgataacgacgatgttaggattaaaagctaacgcattcttataagcaggttcgttcatataaggatgatctcctttgttcaacatggtacgggcgctcactccgaaatttttcacccagtaattgtcgcccaacatacgggccagtacggaaggatagctgtcacggctgcgattctttattcctgctccgaacgtaatgctgttgccgatgcaagccacacggacggcatctttgcgaggagccttgaaactacgcaaccaagaagtcagttcgttctgcatttcactcttgtagaggaaatcttcacgaattccccaaccgtgtccgcccgtaggataaatatggagaacggaaggaacacctttcttatttaaagccagataatagttgactccgttggcaggaggaactaccttgtcatcatcgctataaacaatgaaagcacggggagtctctttggtcacttgcttctcgttggagaattctttttccaaatcggcagaagcgtccttacccaacagattgtcatgagagcccatgtgagtgaaagatttgtccatcgtaatcaccggatagaagagaatctggaagttgggacgaagtgcttcaggcgcatgtgtagcgatggtcgaagccagatggcctccggcagaagaccccatgataccaatatcattcggattcagattccatacgtcagcgctgtcacgtaccattttcatggctgcttcggcatcggagatcgggagggtgcggtcgcctttcggcatccggtatttgagaacaatcaatgcaattccttgtttgttgaaatacggcgcccaatcatacccttcgtgattgaccgccaaaccggagtatcccccacccggacaggctaccacagcacgacctgtcgccagttccggtgccggcaggaaaacacgaagagaaggctgttcaatatcaaatggttttggcgtactttgtgccgagacttgcagacctgtcaatagcaggaccagcaatacaaaaagagaagagaatttctgtttcatagtatctgtatactttgattaatgaatatttgatgtgcgaagatagtaattttatgtatctttgcgcctccttttaaatagaaaaaatgatatgcaaggaattaagaatctgacacacggccctatcaaccgccaacttttcaatctggcgatgcctatcatggcaacgtcgtttatacagatggcatacagccttacagacatggcatgggtaggacgattgggcagtgaggctgtagccgccatcggttcggtaggaatcctgacgtggatgtccggttctatctccttattaaataaggtagggtccgaagtcagcgtaggccaatccatcggtgcgcagaatcaggaagatgcccgccagttcgcttcacacaatatcacgattgctctgatcatttcgatctgctggggcggactgcttttcatgttcgcaagccccatcatccgcatctatgaactagaagagcacatcacagccaatgccatcgaatacctgcggattatttccaccgcattgccgttcatattcctgtctgctgccttcacaggtatctataatgcagcgggacgaagcaaaattccattttacatcagtgggacgggactgattatgaatatcattctcgaccctctgtttatcttcggcttcggactgggaacaaacggtgccgcctacgctacatggctctcgcaggcaacggttttcgccatcttcatctatcagctgcgtttccgcaaagacgccctgctcggcggtttccccttcttctcccgactgaagaagaagtacacacggcgtattctgaaactaggtctgcctgtagctaccctaaacaccctgttcgccttcgtcaatatgttcctctgccgtaccgcatccgaacagggcggacacatcggactgatgactttcaccaccggcggtcagatagaagccatcacctggaatacctcccaaggtttctccaccgcacttagcgcctttattgcccagaacttcgccgccggacgaatagaacgggtactgaaagcctggcacaccaccctatggatgacgggaatcttcggaactttctgcacgctgctgtttgtcttttacggcaatgaggtcttttcgatctttgtccccgaacaggcagcttacgaagccggaggtgtatttctgcgtatcgacggatattcgcagctgtttatgatgctcgaaatcgcgatgcagggagtgttctacggcatcgggcgtaccgtgcctcctgccattgtcagcattgtatgcaactatatgcgcattccgcttgccatcctgtttgtacggatgggcatgggagtagaaggtatctggtgggcagtatgcgtcacaacgattgccaaaggactgattctcttgggatggttcaccatgatcaggaaaaaatgcttaaatctgccttccgtgtcaacaaggtagtcgtgtcgtttgttattttacatatacaaagatcgtccggagttattttaacttaaaaagtatgaccttggcaaataatatgtatctttgcgttgttaatttattaaagtattattttataaacctatttaaaaaacattgcattatgaacaagatgaaatggatggttctcttcatgagtataaccatgatattcagtggctgcgcaagcatgaacaatacgggcaaaggtgccgcaatcggcggtggttcgggtgctgcattgggtgctatcctcggcggtgttatcggtaaaggcaagggtgctgccatcggtgcggctatcggtactgcagtaggtgcaggaacaggtgcccttatcggaaagaagatggataaagcggcagcagaagcaaaacaaattgaaggcgcacaagtagagcagataactgacaacaacggattgcaggcagtaaaagttacattcgattcaggtattcttttcactaccggtaatgcaactctgagtgctgctgccaagtctgcattgagcaagttcgccaacaacgtactcaaccagaacagagacatggacgtatccatctacggatataccgacaatcagggctggagaaacagtactgccgaacaaagccgtcagaaaaatctgaacttgtcacaggaacgtgcacagagtgtagccagctacctgttaaactgcggcgtttcttccaaccagattaaaggtgtgcagggaatgggcgaaagcgatcctatcgccagcaacgacacagctgccggaagagaacagaatcgtcgtgtagaagtttacatgtacgcaagtgagcagatgattaaagatgcacaggccgcttccaattaaaaaaatattgcgttatgcgcgcaacctgctgattttcttctttgcatctaccattctggctgtgatcgtctaccgctttatgccggtgtatgtcactccgctgatggtcatccgaagtgtacagcagcttgcgtcaggagataaacccacgtggaaacacacgtgggtttcttttgataaaatatctcctcacctgccgatggcggtcatcgcctccgaagacaaccgctttgccgaacacaacggattcgacttcatcgagatagagaaagcgatgaaggagaacgaaaaacggaaacggaagcgcggagcaagtaccatcagtcagcagacagccaagaatgtgttcctatggccgcaatcatcttggatacgcaaaggtttcgaagtttatttcacctttctgatagagttgttctggtcgaaagaacggattatggaggtatatctcaactccatcgaaatgggaaaagggatttatggcgcacaggctgccgcaaagtataaattcaacacaacagctgccaagttgagctcaggacagtgcgcactgattgccgctacgctccctaacccaatacggtttaactcagcgaagccttcggcttacctattgaaacgacaaaaacagatattgcgattaatgaatctggttcctaagtttccgcctgtagagaaaaaggcggtcgataagaaagacaccaggaagaagaaaaagaaataaagcaatccctttatcacagtctatttcatcaagaaacaagacaaggataaagggattacttttttctgttattatttgagatacagactatgccggttcctcacacctctcgatatacgccaatggttcgcctttatctaccaatgctccctgcttggcacatacctcgatcacacgaccgctaaaattcgccaacaccttatcatatgtatgccaaggagtagcaatataacaaaacacatcgtccggaccatatttatgtcccacttcgggcggcatagaaggcgattccacatcgatctcccaaatgatctgccctttctccattgccgtcaccggttcggctttggcacgtttcatccgtttcacttcttcttcggagaatccctgttttgccaatgcggcatctttggcacgctgcaaatcatcttcgaaacgtttcttggcaatacccgatttataatcccgatattggcggtcgtgcattgccagttcgaaaagttcttcatcatcctgtccgaaatcccagcttttttctgtcatttccttacgatactcgtccagttgatccggatagttcttctgcgggtcttcgtccgtaaattcgtatcctttttcttttgccaatgcgataatctccggagcaagtgcaccgggcaaacgaccactcttacctagaatcatatcccaggtatggttgtcgatcatcgtccaacgctcctctcccttgatcagagacatcacattcatcaatgccacattcttcacatattggctgaacggagtcactaatggaggatagccgagtttcggccacacatattccacttcgtcaaacagcatcacgagcaaatcgtcgatgctcagttccggttcgttcttacctctcaatatcagattgatgccggaatgcactcctttcagatcggccatcatagaacccatcatacctccgggaagtccgcatttcaagagcaaagaagacatatgcttgttggtagggtccataaaataacccagaaaatcgtcaatgaactcctgtgtcatggcacgggctttcatgtaggctttcatattaatctccggtacctgaaatcccgcgtctttcagcatagcctgcacagagataacgtccggatgaactttcccccacgaaatcggctccattgcaacatcaataatatccgcgccattctcacaaacttcgaggatagaagccatcgaaagtcccggtccgctatgtccgtgatactggatgatgatttcgggatgccgttccttgattgctttcgtcagacgtcccagcatttcggggcgaccgacacctgccatatctttcagacagatttccggtgctccggcctctatcagacgctcggcgatagcggtataatattctacggtatgtacgggcgagaacgtaatacataacgttgcctgcggaatcatccccgcttcaagggcataatgaatggaaggaataatatttctgacttcattcaagccgcaaaagatacgggtgatgtccactccctgcgcatgttttactttatacattaaccggcgcacatctgccggaacgggatacattcgaagaccattcagaccacggtcgagcatatgagtttgtatgccggcttcgtggaaaggtttcgtgaaagcccggacggctttgttcgggttctcgccatacagtaggttgacttgttcgaacgcgcctccgttggtttctacacgggagaaacaacccatttcgataattaacggagcaattcttactaactgatcggcacgcggttgatacttgccggacgactgccacatatcccgataaacgagactgaatttgatttcctttttcattgccgtaaatagatgagatttatattacttaggttaactagttgatacaaatatactgagttctctgacataataacaaatacagagagaataagttggggtataaagacatgtttaatatcatattgtcacaaaatcaaaggagcaagcgagtttttacccgttgctccttaccagaattaattgtttgactaatgtgctatccctatttatacaaaatctttcaactcttgttgcaaacgttggcgtgtgaagaatatgcggctcttcaccgttccgaggggtaggtccagcttctcagcgatctcacggtatttaaaaccggatacgtgcattgaaaatggtactttatattccttcggcagcgcgttgacgatgcggtgcatctcttttaagtcataagcgccttccgtactttcaaatcctgagtcttgggggagattcaaatgatacagattgtcggtctgatctacgaatgtctggtcacgtacgattttacggtagttattaataaagatgttacgcatgattgtgtacatccatcctttaaaatttgtatcgggaacatatttttcctcgttatccaaggcctttaatgatgtttcttgcaataaatcatttgcttcttcacgattggcagttaatttataagcaaaacgaagcaactcttcctgaactccaattaaatcttttctgaaacttaaacttttcatactttaagggttttacggttaatatttcgtttctttcttgacgtttgcaagtttaaaggtattttatgagtcaaacagggggaaattcgtcatttcttagggggtgaaactgtcaaatgatagattttaggtgctttttgatagtttttaggtggtttaggacgttttttattctcttcttcttgcttggcaatacaaaataacttacttttgggtagtattattaacttaaagtaaaggacatgactatacttattatcgtaggaataatcgtactgttgggaatcatttttgcttccatgtacaactcattggtgagactgagaaataaccgtgaaaatgcttttgcagacatcgacgtgcagctgaaacagcgccacgaccttatcccgcaactggtggataccgtgaaaggatatgccgcacacgaaaaagataccctcgaacgggtgattcaggcacgtaacggtgcagtcagcgccaagacaatcgacgaaaagatagcagcagagaatcaattatcttccgctttatcgggattgaaaatcacgttggaggcttatccggacctgaaagcaaaccagaatttcctgcaactgcaagaagaagtatccgatgtagagaataaattggctgctgtacgccgttactttaactcggccacgaaggaatataataatgcggttcagacattcccgtccaatatcatagcaggtatggcaggtttccgcagagaaatcatgttcgacctaggtaccaacgaacgtgcgaatctggaacaggccccgaagatcagtttctaaaaacgagcacgtatgcagtacgtcggaatccaaacacagcagagccggaacaatcggcgctctgttcttctgttatttctatttccctgcctggtagcagcattgctttatctggcctgctatctgctggctgctatggggcacggtgaaagcatggaagtaagtatcctggaattggctaatcctcttttcatcaatgccctcccctatacgatgggtgtcgtattgatttggttcctgatagctttctgggcgaatacgagtatcatcaaagccgccacaggtgccaaacctctcgaccgcagagaaaacaaacgtgtctacaatctggtcgagaacctctgcatggcaaacggaatgaaggctccgaaaatcaatatcatcgacgacgattcattgaacgcttttgccagcggtatcaacgaccgcacctatacggtcactctctcgaaagggattattcagaagttgaacgacgaagaactggaagcagtcatcgcccacgaactgactcacatccgcaacagggatgtgcgcctgctgatcgtctcgattgtatttgtcggaatcttctcgatgctgacgcaaatcactttctatactattacgcacacgcgcatacgtagcaacgaaaaaaacggtggaggagctatcctcatcatactgattgccttagtaatagccgctgtcggttacttctttgccagtctgatgcgcttcgccatttcacggaagcgcgaatatatggcagatgccggttcggcggagatgacaaagaatccgttggcattggcaagtgccctgcgcaaaatttccgatgatccggatatagaagcggtaaaacgtggggatgtggcgcaattattcattcagaatccgggcgaccagtcgaaaagtgccctcagcggacttagcggcctctttgccacgcatccccctatcgagaaacgaatctccattctggaacagttctaaggatttctgtttaattttcattaaagaaagcagggggactccttatttttagtatatttgagtgttatacatatatacactaaactgtaactgatatgaaaacaagaaaacaaatccttatgctactgctggttatgctagcaggaatcccgactctttcggcacagaccaagaaggagaagaaggaacagaagaaagaagctgtcagacagctgatcgtatcagaagactacaagatagacgtcaacactgctatgcccatgcgcggacgttctatacctctgacttcacaatactcactgcaaatcagaaatgattcggtattctcttacctcccttattacggacgtgcttacagcgttccttacggcggaggaagcgggctgatattcaacgctcccctcaaagaatacacgatggatatggataagaagggaaacgccgttatcaaattctccgcccgaagtccggaagacttctttgagttcagggcgaaagtgttccccgacggcaccaccagcatcgatgtcacgatgcagaaccgtcaggcaatcagctaccggggagaagtggatctggacaagaagtaaaatcttcaagaattgccgtcagtctcttcactaccttttaatataggaaggcaaatgtggtatttcacggcaaggatgcgtgtaacaaataccaccgatccgccaacgagctgacagacataagattccatccctgcggcatcgcacagccagtaagcgatgccgcctactacacacgccatcgcatagatttcttttcggaaaatcaaggggatctcattgataaagacatcacgaatcacacctcctgcggcacctgtgatactacccatgatgatggctacccaaaaaggatagcccaaagcgatacttttccccacaccgaccaccgtaaacaaagccagtccgatggtatcgaatataaaaaaggtattattcagacggatcagccagcgaccgaaacagatcacccagatcaaggcaagtcccgtacagatcaaatagatagggttcgtcatccatccgggcgtcacatccagcagtacatcacggatggtaccgccaccgatagcggtagcaagacctacgacataggctccgaaccagtcgaaacgctttgccgaagccagccggataccactaatagcaaaggcaaatgtgcctataaaatcaagaatttgaacgaatgtcggcatatatttgttattttgtatgcaaagtaacgaataaattccgtaagaaaatgtacttttgctacacgaattagatagaaacaatatgaaaataacaattgttgccggggcacgccccaatttcatgaaaatagcccctatcacacgcgccatcgaagccgcaagagggctgggtaaaagcatctcctaccgtttggtgtacacaggcagacgggacgatacaagtctggatgcttccctgttttcggatctcgacatgaaagctcccgatgtctaccttggagtggaaagcagtaaccccaccagtctggcagccggaatcatgatcgccttcgaacaggagctgacggaaaatccggcacacgtcgtcctggtagtggatgatctgacagcaaccatgagttgcgccatcgtagccaagaaacaaggaatcaaggtagcccatctggtagccggcacacgttccttcgacatgaagatgccgaaggaagtaaaccggatgattaccgacggagtatccgattatctgtttaccgccggcatggtggccaaccgaaatctgaatcagacaggcacggaaagcgaaaacgtatattacgtcggcaacattttggtagataccgttcgtttcaaccggaaccggctgctcaaaccggtatggttctccgtgctgggacttcaggagggcaattatctcctgctcaccctcaaccgacgtgtactgctcaacaacaaagagaacctgcggaagttgatgcaaacgatgatcgaaaaagctgccggtatgcctatcgtagcgcccatgcacacttacgtgcgcaatgcgatcaaagacctcggcatagaagcctcgaaccttcatatcatgcctccgcagaattatcttttcttcggatatctgatcaataaagccaaaggaatcatcacggactccggcaatgtagccgaagaagctacgttcctcggcatcccctgtatcacgctcaacacgtatgccgaacatccggaaacgtggcgcgtgggaacgaatgaactggtcggcgaagatccggcagcactcgctcaggctatggatacgctgatgaaaggtgaatggaagaaaggcgaactccccgaacgctgggacggacgaacagccgaacgaatcgtacaaatattaacaagtaaataaccggagtggttgagccggactcgatgatcaacgagccggcttaatagccagacagaagtagccgaccactatcaggttcgacaagtgtttcagaaagtttcacgccgaggaaaccaaagtttcaaggcgtagaaaccagagtttcaagcagtgggaactagagtttcaaggcatgaaactttttgtttcaaccgttgaaacagattttggaactacggaaaagaatcggagcatgccggttcgcaagatgtggcatacgttgaaaagggaagtataaaaagacaaaaacaatctgcctccttccattgttgaatgatataagcttgtaaataacaaaaaacgatgggtaaaaaaagttatatactctattttactcagacttatttgttaactttgcagccctactacgaacgttatgatacaacgatataacaaaatactgatactgctcttagtcgtatttgcagtttcaaatgcttttgcgcagcaaataaagggggttgtaactgattcagtcactcatgaaccactaatgtatatctctgtctattatcaagacaagagagaaatgggtactgtcaccaatattgacggagaatataaactcgacgcgcggagaaacggaggaacgctcgttttctcttccatcggatatgtcaccaaaaccgttaaagtaggctccggaaatcagaccgtcaatgtcaaactctctccggacgatgtaatgctcaccgaagtagtcgtaaaaccacagaaagaaaaatactcccgcaagaataatccggcagtcgaattcatgaagaaagtgatcgaacacaaaaaagcacaagtgctcgaagtgaacgattactaccagtacgacaagtacgagaaaatgaaaatgtctatcaacgacctgactccggagaaactggaaaagggtatctacaagaaatactcattcctcaaagatcaggtggaagtgtcggagacgaccaacaaactgattctccctatctccgtacaggaaacggcctcacaaaccattttccggaaagatcccgaaagcaaaaagaccattatcaaaggaaagaactccaatggtatcgaagagtttttctccacaggagacatgctggggactgttctgaaggatgtttttgccgacatcaacatttatgatgatgacatccggctgctccaacagcgattcgtaagccctatcggcaacaatgccatctcgttctataaatactacctgatggatacgctgatggtggacaagcgcgaatgcgtacatctgacgttcgtaccgcagaactcacaggatttcggatttacaggccatctttatgtgctgaaagattcgacctatgccgttcagaagtgtacgatgaacctgcctaaaaagagtggcgtcaactttgtcaaccgcatggacatcgtgcagcagtacgagcagcttcccaacgggaactgggtattggcggatgacgacatgacggtagacctttcatggagttccaacaaaacctcaggagggttacaggtagaacgaacgactaaatacagcaattataaatttgatccgatagaacagcggttgttccgtttgaaaggtcctgtgatcaaggaggccgacatgctttcgaagagtgacgaatactgggcgagtgtacgccaggtgccgttgaccagaaaggaaagcaatatggatgtattcgtcaaccgtctggaacagattccgggattcaaatatatcatcttcggtgcgaaagcattgatcgagaactttgtggaaacaggcagcaaaggccataagagcaaagtggatatcggtcctatcaacaccatgatttcaagcaactacatcgacggaacccgtttccgcctgagtggtatgactactgcccattttgacaagcattggttcctgagcggatacggagcttatggtctgaaagacgaaaagtggaaatatagcggaacgctgacttattctttcaacaaacgagattatgtagtatgggagtttcccaaacattttatatctgcaacgtacagttatgatgtaatgtcgccgatggacaagttcctgtttacggacaaagacaacatcttcctttcgatgaaaacgacaacggtagaccagatgtcatatatgcgtgatgctaccatcaactacgaactcgaaacgctgacgggattcgaagtgaaagccatgctccgccatcgaaatgacgagcctaccggaaaactggaatatctgcggaatgacgctgcacaaacccgtgtgcatgacatcacgacttccgaagcgagtgtgacactgcgttatgctccgggagaatctttcgtcaactccaagcagcgccgtgttccggtgtcgctggacgctcctatcttcacgctgactcatgccatgggcttcaaaggcgtgctgggcggagaatacaacttcaaccgcacggaagcaagcatctggaaacgtttctggcttcccgcttcgtggggaaagatagactgtagcgtaaaagcaggggcagaatggaatgtcgtacctttcccgctattgattctgccggaagccaacttgtcatatatcactcaacgtgagacattttccctgatcaacaatatggaattcctgaacgaccggtatgcgtccatgtcactttcttatgacatgaacggaaagttgttcaaccgcatcccgctgatcaagaatctgaaatggagagaaatgttccgtatccgcgcattgtgggggacattgaccgacaagaacaatccattcaagagcagcaaccccgacctcttccgtttcccgacacgcgacggtaaattcaccagtttcgtgatggacccgaaggtgccgtatatcgaaggaagtataggtatctacaacattttcaagttgctgcacgttgaatatgtacatcgtttcacctaccgtgacaatccgggtatcaacaagaacggtattcgtttcatggtattaatggtattctaaaactatgcaacctttagcagaacggttacgaccaaagacattggatgattatatcggtcagaaacatttagttggaccgggggctatcctgcgtaagatgattgatgcgggacgtatttcttcgtttatcctctggggacctcccggagtgggaaaaaccacattggcacagattatcgccaataaactggaaactccgttttatacgctgagtgccgtgacttcaggtgtcaaagatgtgcgcgaagtgatagagcgtgccaagagcaaccgctttttctcgcaatccagtccgatcttatttatcgatgaaatccatcgtttcagcaagtcgcaacaggattctttgttgggagctgtggaaaacggtacggtgacgctgataggcgcaacgaccgagaatccatcattcgaagtgatccgccctctcctctcccgttgccagctttatgtgctcaaatctttggaaaaggaagatttgctcgaacttctgcaacgtgccatcaccaccgacaccatactgaaagaacggaaaatcgaactcaaagaaacgacagccatgctgcgcttctccggcggagacgcccgtaaactgctcaatatactagaacttgtagtggaatcggacacagaggaaacggttgtcattaccgatgacatggtgaccgaacgtctgcaacagaatccgttggcttacgacaaggacggggaaatgcattatgacatcatttccgcttttatcaagtctatccgtggcagtgatccggacggggctatttactggctcgcccgcatggtagaaggtggtgaagaccctgctttcatcgcgcggagactcgttatctctgctgccgaagatataggtctggccaatccgaacgcattgctgctggcgaatgcctgctttgaaactctgatgaaaatcggttggcccgaagggcgcatccctttggcggaaacaacgatctatctggcaacgagtcctaaaagcaattcggcatacagtgccattaacgatgcattggagttggtgcgttccaccggaaacttgcctgtgcctctgcatttgcgcaacgctcccaccaagctgatgaagcaactgggatatggacaggaatacaaatacgcccacagctacgaaggcaacttcgtgaaacaacaattcttgccggacgagctgaaagaaaaacgaatatggcaacctcagaacaatgccgccgaacagaagcatgcagaacggatgcagcagttatggggagaaaggtttaaataagtaataagttataggtaataagtaataatcgtagctgtgaaagaaaacttgatgaaagagaaatcaacgaggtttgcaattcgaataattaatctatataaatatttaagggattgcaaaaaggaaacgattctttcaaaacaattattacgtagcgggacttcgataggagctaatataagagaggctgtctatgctgagtctcatcttgactttatacacaaatattccatttctctaaaagaatgttctgaaacagaatactggctatatttacttcaacaaacagaatatataagcgatgaagaatatgaatcaattaatacagactgtctggaaattcttaaattactgacagccacaattgtaaaaccttaattccgcaacactattataaattaaactttttaagtacctgagcaacaaaaagttgctcaggattttgccatgtcagaattttcacttatcttagtgttgcaaaaaaaacaagagaatccgacgatagacatggcgaagatacaaattaaatctgagagactcactccttttgggggattattttcaatcatggagcaatttgactccacattatcatctgtaatcgactcaaccctcggtctaaggtgtagatcgttcggttatcagtacagcgaaatcatccgttctctcatgagtatctacttctgtagcggttcatgtattgaggatgtcactactcatttgatgaaccacctctcgcttcatccgacacttcgcacttgtagctctgatactatcctcagggcgataaaggagttgacgcaagaaaacatttcatacacatcagatatgggcaagacctacgatttcaatacggctgacactctcaatactttattgctcaattgtatatttgcatctggccaactgaaagagggtgagatgtatgatgttgatttcgaccatcagttcatagagacagagaagtatgatgcaaagcctacatacaagaagttccttggttatcgccctggcgtggcggttattggcgatttgatagtcggtatagagaatagcgatggtaacacaaatgttcgtttccatcagaaggacacgctgaagaggttctttgcgagatttgaacagaatgggctcactatcaatcgcttcagagctgattgtggatcatgttccgaggaaatcgtggaggaaatagaaaaacactgcaagtccttctatatccgtgctaaccgctgcagttcgatctacaatgacacctttgctctcaaaggctggaaaactgaggaaatcaatggcattgagtttgaattgaactctatccttgttgagaagtggaaaggtaaggcatatcgacttgtgattcaaagacagaaacggatggatggtgtgcaggatttttgggaaggagaatacacataccgttgtatcctgactaacgactatgattcttccgtaagagaaattgtcgagttctataaccttcgtggaggaaaggaacgtatcttcgatgatatgaacaatggtttcgggtgggacagattgcccaaatccttcatggcagagaacacagtgttccttcttcttacagcacttatccgtaacttttacaaggccattattcaaagacttgacgtaaagaagttcgggctcaatgcaacaagtcgcataaaagcgtttgtcttcaggtttatctctgtaccagccaagtggatcaggacatcaaggcggtatgtgctgaacatctatacctgtaataatgcttacgcagatgttttccagactgattttggataatgcctacaacttatgggaatgatattgtgtattgcctcaagtcacattgtggggtaaggggatattgtaggcagaagtgggtgcttcaagttcaaattatctgcaaattcagtaatgagaggacgtgtaaacgcaataaggacgttcaagggcttagttgcggatttgaggtaaaactaaaaaataatgggaatgccccataatatttattacttattacttattacttattatgaaaatagtagttttagacggctttgccgccaaccccggtgatttatcatgggaaggtttgaaagctctcggagaatgtaccatttatgaccgtactgcccccgaagaagtattggaacgcgcagccggagctgaagtgattctgacgaataaagtaatcatcaacgccgatcacatgactgccttgcccgaactgaagtatatcggtgtgcttgctacgggatacaacgtagtggatacggcagtagccaaagaacgtggtattattgtaactaatatccctgcatatagcacagcttccgttgcacaaatggtatttgcgcacattcttaatatctgtcagcaggtacagcatcattcggaagaagtccacaaaggtcgttggaccaataacaaggatttctgtttttgggatactccgttgatagaattgcgggataagaaaatcggtcttgtcggattgggaaatacaggatatactactgctcgcgttgccatcggtttcggtatgcaggtatatgctttaacttcaaagtctcacttccagttgccaccggaaatcaagaagatggatttggatcagttgttcagcgaatgtgatattatcagtctgcactgcccgctcactccggaaactcacgaattggtgaacgcacgccgtcttgctctgatgaagccgaatgctattttaattaatacaggtcgtggcccattggttaacgaacaagatcttgcagatgcactgaacagtggcaagatttatgctgccggagtagatgtactttcttcggaacctcctcgtgccgacaatccgttgctgactgcaaagaactgctacattactccgcatatcgcgtgggcaagcacagaagctcgtgagcgtctgatgaatattgccattagcaatctacaggcttatatctccggaacaccggaaaatgtagtgaataaataggattaccaagagagtactaagagaatatgtcgaagccctcatagattaaagatcatcctcgctacaactatctgtggcgaggatgatttcgttaaaaggggagtttgacacatcctcttcctttaatgtctatcaaaattaccttaataggaatgtcctccttcatccatctccttctccgtaatcttatggcggtcgatactacgccatgcatagaatatataagctatcacaaacggaacaagaatagagacataagccatagtcttcagcgtaaattcactcgaacagctgttagccaatgtcagcgaactttgcaagtccgtatatgaaggataataagcagtgttattatatccggctacgagtaacaaagccaagactgtcagcactgtacctatccctgcaaaccagattcctttgtcgaaagtctttttcagaaccgtcttaccgattccaaaaagtaccaatactacacctatcaggaagatgatcagaactaccggcatttctataaagttgataaagtacttataaggctgcatataaacctccaatgtatccggattgacagcaaaaccgtcagaaaccaatgtacggattacaaatgccaaaaagaatacaaggaagaaaatagtattattcaatactgcacgacgacatttatcggtcagttccttatccgctatactattaatgaaatagagcgaacccaacacacgtgccaaaaagaatacagccagtccgagaataacattccagatattagtcaacgcgtccagtccgtgccatccatttccccaatgactgataaccggcataatcgtatccgtcatattcgccttattaatatagaaatcagaaccggtgaagaaagtggcgactgctccacccagcaacagaggtcctactaccccattaattaccaagaaagtctgataggtctttttacccagcaaattccctgccttgctctggaactcgtaactcacagcctgcaacacaaaactgaaaagaataatcatccaaagccagtaagccccaccgaaactggtactgtaaaacaacgggaacgaagcaaagaaagcacctccgaacgttaccagcgtagtaaacgtaaactcccacttacgtccggtagagttcaccatcatcttacgatgttcctccgtcttacccaaacagaacaataaagaatttcctccctgcacaaataataaaaatacaagtatggcccccagcaaggaaacgaccagccaccaatattgttgtagaaatatatacataatatgtaagtattaagttttaagtattaagtattagctcaagtaataagcaatgtatagtatcaagtaataagtaatagataataagtaacaacgtcaaccatgatgacaaatcagcctgcagctacgattaatacttattacttaatacctattacctattacttatctcttcttccggtcctttcttaatcgccttcaccataatccctatctccgcaatcagcattacggtaaacaagatcaggaagataaagaaagtagcctgaacggagcctacatccaatttagagatagccgccgatgtaggaagcatatcgcggatagcccaaggctgacgaccgcattcggcaaccacccatcctgcctgtccggcaatgtaagccaaaggaatggtcagcagagcgatccaatgcatccagcgcatcttactcaaatctttcttatatataaagaagagcacaacgatgaagaaaaggataaaatatccgcccaggataaccattatacggaaagcgtagaagttcagaggaacattcggaaccagctgattcacatctttaatatatccgtatccgaagtatggcatattctcctgcaaaacctgataggcaacagcggcatcttcctcgtgcccggcgctcttcgctgcacgataagcagccagcgctccgatagcggtcttaccccgctctatcttttcggctgccgacaaagcagtcgtaccgtctttcagctgatagccgccttcgataatattggtaattccggggacatactcgtccacatcccgctcggcaaggaacgaaagcatactgggtatctcaatccggaacaggaaagggtctttcccatcattgtaagtcttcttttcggggttcagcattcctattcccaccagacctacattggttcctccttcataaagtccctctacagccgccagtttcatcggttgggtctgtgcaatctgatagccggaaccatcgcccgtccatacagccagcagtgaagagacaagcccgaagatagcaccgatctttatgcttgcaagcgcaaactcgcgattacgtttcttcagcagaaaccaacaactgattcctacaacgaacacgccaccaagtacccatccggacaataccgtatgaaagaacttgttgaccgctacaggcgaagttgccaccgcccagaaatcaaccatctcattacgcactgtatcgggattgaactccatacctaccggatgctgcatccatgcgtttgctacgagaatccaccaagcggagatcgtagcccccagaccagtcagccaggtagaagcaaggtggaagcgtttgctcaccttatcccatccgaagaacatgacagcgataaacgtggcttccataaagaacgccagaataccttcaatagcaagcggcgcaccgaaaatatcacctacaaaccaagaataattactccagttcgtaccaaactcaaactccaggatcaatcctgtcgctacaccaatggcgaagttgataccgaaaagtttcatccagaacttggctgtccgcttccaaaattcattgcctgttttataatacaacgtctccattattcccatcaccacagccagtccgagggtgagcggaacgaaaatccagtggtacatggctgtcatcgcaaattgggctctcgaccaatcgatcagcgaggtgtcaatactttcaatcataatcttatgtagtttaagagttaaaaatcagtggttttctccggaagtgcacgctgtatcagctcatttcccacatacgtacccttgtcggcatctgtaggatgatcgccaagaaagtcgggaaagaagaaaattttgaggatgaagaacataatgaataatttcactaagataataagccacaaagtacgacctaacgtcatactacggaaaccctccaaataaaagttccatattgcaagcagtgtattcttcataagctgaccttagaatttgtaatgagtacaaatatacaatttttatctgattatccgtttatgcacctgttatattcgcaattactagtctgtcaaagagtttgtctccaaaataccgtctgtttaatttgtaaataaactcgttgagatacaactgtaagtatttccttttgattttatggtagttgcccagcaatgtccgttttgcattactgattgcgatatgcacccatttgagtgtttccttggtggttttggcgtctgatttctcggtgacgtgcaattccaccagatcggagatgtcaacgtaagaagtgcttttgtccgaaaatacgatggcatcatcctccatgcagtccctgaccacgccgttgattccttcactttgatggctatccagtaccctggccttgaaataacgcacatgcttctcctttttgcccgtttcgatatcttccaacggggtgctttcggccatcaccgcaacgttctgctttccctcggctccccggccacgtgtacccttgcctcgctcgatttccttactggccaccgaaaagtaaccctcatccagttctatcatcccttccagtgtataccttgcatcccggttgcccatcgccctgcggagtttgtgtaccatcgcccataccggttcgtaacgcttcaatcctaattgcttctggagttcgttggtggagaatcccttttttgtgcaactcatcaggaacatcgttttgtaccacaccagaaacggcagcttggagctctccatgatcgtaccgctgcgcaacgaggtgcggaaacggcaacctttgcattcataactccatttaccctgtaaccaataatgggaagtgcccccgcatcgcttgcagacaaccccttccttatcacgctgctccttgaaatgcaaacgacaatcttcctccgaaccgaaatgagccgtaaaactgaatatgttcataatccctgctttttgagcgctaatatactaaaaatattaggtgtgtttgcggagaatcagaatttttataattaaaacaaacaagtaaggcaaaatgttgcatgatttgtatggtttttctcaaaaaacctgcctatcgacagaaaaaaaacatttaacggcgaaaaagcgccatctgtctatcgcttttgcagctaatataatatgtacgtaccttcgttccagtaaatcaatagacatataaaaatatgataaatgtaagaagattgacagtgatagcatttcttggagcgggtctgctgcccggtatatccgcccaggaatcttctgtgcagacagccgcccagagcgagatgaatctccccgtccaatgggatttacagtcgtgcatcgactatgcgttgcaacagaacattacgattcgcaaaaaccgggtgaatgcggaaagtacacagatcgatgtgaagacagccaaagctaccctgttccccagtctgtcgttctcaacgagccagaacatggtgaaccgtccgtatcaggaatcaagcagaacgatcagcggaagcgaggtgatcgagacaaccagcaagaccagttacaatggcaattatggtctgaatgcttcgtggaccatttataatggtagcaagcgactgaacaccatcaaacaggagaagctgaacaatcaggcagccaatctggatgtagaaacgtccgagaatagtattcaggaatctattgctcagatttacattcagattctctatgcagcggagtccgtcaaggttaatgaaaacacgctgcaagtttccattgcgcaacgcgaccgcggacaggaacttctgaatgccggaagcattgccaaaagtgatctggcacagctggaagctcaggtcagcaccgaccgttatcaattagtaacagcgcaagccactctgcaggactacaaattacaactgaaacaactgctcgaattggatggggagaatgaaatgaatgtctatctccccgccctgtccgacgaaaacgtactgttgccattgcccaccaagaaagatgtgtatatgagcgcgctcaccctccgtccggaaatcgaggcgagcaaactgagcgtagaggcttcggaactgggtatcgatatcgccaaagcgggatatctccccaccatcagtctgagtgcaggtatcggaacgaaccacaccagcggcagtgacttcaccttcggagaacaggtaaagaacggatggaacaactccatcggagtttctgtcagcgttcctatcttcaataaccgtcagaccaagagtgccgtgcagaaagcgaagttacagcgcgaaacaagtctgctgtcgctgctcgacgaacagaaaacactgtataagaccatcgaaggactttggctggatgcaaacagtgcgcagcaacgttatgcggcagcgaacgaaaagctgagaagtacacagatcagctacgacctgatcagcgaacagttcaatctgggcatgaagaatacagtagagctgctgacggaaaagaacaacttgctgcaagcacaacaggagcagcttcaagccaaatacatggcgatactgaacactcagttgctgaagttctatcagggagacaaactggcattataagccttcttccttactaaaagcggaatataaataagtaaaaacagaatatagaatgaaaacgaaaaagattatcctgatcgctgtggcagttgccgtagtagtgggcggaggaatctggttctttacaggttctccggcaaagcacaaggtgatgtatgccagtgcgactgtcagtaaaggcgatatctccaattcggtgactgccaccggaacaatcgaaccggtgatagaagtagaagtcggtacgcaggtatccggtatcatcgacaagatttatgcagattacaactcggtagtaaccaaaggacagctgattgccgaaatggaccgtgtcactttacagagtgaactggcatcccagcaggcaacttacgatggtgccaaagccgaatttgaatatcagaagaagaactacgaacgtagcaagggattgcacgataagtcattgatcagcgataccgactacgagcaggctctctataattatcagaaggccaagagcgctttcgacagcagcaaggcatctctggcaaaggcagaacgtaacctgtcatacgctacgattacttctccgatagacggagtagtcatcagccgcgatgtagaagccggacagaccgtagcttccggattcgaaactcctaccctcttcaccattgcggccgacctgacgcagatgcaggtagtggcagacgtagacgaagctgatataggcggtatcgaagaaggtcagcgtgccagctttactgtcgatgcctatccgaatgatgtgttcgacggagtcgtgacacagattcgtctgggagatgcaagcagtagcagcagcgccagttcaagtaccagcacggtagtcacttatgaagtggtgatctctgctccgaatccggacttgaagctgaaaccgcgtctgacagccaatgtgactatctttatccttgataagaaagatgtattgtctgtccccaacagagctttgcgtttcacccccgaagcaccgttgatcggtaagaatgacatcgtgaaagattgcgaaggcgaacataaggtatggacgcgcgaaggaaccacctttacggctcatccggtagaaatcggaatcagtaacggtatttccacagagatcatcagtggtgttgccgaaggaaccaaagtcgtcacggaagccactatcggtgctatgccggacgagaatatgaatagagaaccggggcagggaaacggagaaagaagcccgttcatgccaggccctccgggaaacaacaaaaagaaaagcaacaagtagccaagtatgaaaaaagtaattgaacttcaaaatatcaaacgagactttcaggtgggagaagaaaccgtccatgcgttacggggcgtttcgttcaccatcaacgaaggtgagtttgtgaccatcatgggtacttccggttcgggaaagtccacactgctcaacacgttgggctgtctggacactcctaccagcggggagtatctgctcgatgacatctccgtgcgcaccatgagcaagcctcagcgtgccgtactgagaaaccggaaaatcggcttcgtcttccaaagctacaacttgctgcccaagacgacggctgtggaaaacgtagagttaccgctgatgtacaactcatcagtgagcgcttccgaacgtcgccggcgtgccgtcgaagcgttacaggctgtaggtttgggcgaccggttggagcataagtccaaccagatgtccggaggacagatgcagcgcgtagccatcgcccgtgcactggtaaacaaccctgcggtcatccttgccgacgaagcaaccggaaacctcgacacacgtacgtcttttgatatacttgtcctgttccagaaacttcatgcggaaggacgtaccattatattcgtaacgcataatcccgaaatcgcgcaatacagcagccggaacatccgcctgcgcgacggtcatgtcattgaagatacagtcaactctcatgtcctgtccgccgccgaagcactggccgcattgcccaaaagcgacgaggattgaagataagtaataggtaataagtattaggtattgggtattaagtatcaaatattaagtaataagtaacagtagtttatgaatggaactaacttatttaaaatagctctccgggcattggcgaacaacaagctgcgtgctttcctcaccatgcttggtatcatcatcggtgtcgcttccgtcatcacgatgctcgctatcggtcagggatcgaagcgaagcatccagcaacagatatcggagatgggatcgaacatgatcatgatccatccgggagccgacagacgggggggggtccggcaagacccatcggctatgcagacgttgaagctgaccgactatgaggccttgcgcgatgagaccaatttcctgtccgccatcagtcctaatgtgtcttcgtcgggacagcttatcgcgggtaacaacaactacccgtcatccgtcagcggtgttgggctggagtatctcgacatccgtcagctgagtgtagaaagtggagatatgtttacggaagccgacatacaaagttcggctaaggtctgcgtgatcggtaaaacgattgtagacaacctctttccggacggaagcgatccgatagggaaaatcatccgcttcaacaagataccgttccgggtggtcggtgtgctcaaagccaaagggtacaactctatgggacaggatcaggacaatatcgtactggctccttacaccaccgtcatgaaacgattgcttgccgtcacctatcttcagggtgtctttgcttctgccctatcggaagacatgaccgagtatgctaccgatgaaatcacggaaatcctgcggcgcaaccataaattgaaagcttcggacgaagacgatttcaccatccgtacccaacaggagttgagtacgatgctaaactctaccaccgatctgatgaccaccctgctcgcctgtattgccggaatatctctggtggtcggcggtatcggtatcatgaatattatgtacgtgtccgtcaccgaacgtacccgtgaaatcggtctgcgtatgtccgtcggcgcacgtggcgttgatattctgagccagttcctcatcgaggctatcatgatcagtattacgggaggtcttatcggagtcatcataggctgcggagccagctggatcgtgaagagcgtggcacactggcctatcttcatccaaccttggagtgtcttcctttctttcgcagtctgcaccgtcaccggagtcttcttcggatggtatcctgcaaagaaagcagcagatttagacccgatagaggcaatcagatacgaataaaaaactatctttgtctttatgaaacaaagcctaacatccgcacgtcgtcccctggaagcactgatacacattatcggctgggggattatgttcggttttccgttcttctttgtagagcgcgaaaacggaaacatcaactggatggcatacttacgccattctgccgtaccgttgtctttcatgatcgcgttctacgtcaactacttcctgctggttccccgatatctttttcagagccagaccaagaggtatattacttacaatattctcctgttgtgtgtcatcggtctgatgctgcacctttggcggagtctgacattcgatccttcctttgttcccaagcctcaccggtcgggtggtcctccgggatggctgttctttgtcagagatatgctgagtctcgtcttcaccatcggactgagtgccgccatacgtatgagtgcccgatggacacaagcggaagctgcccgtaaggaagcggaacggaaccgttcggaagcggaactgaagaatctgcgcaatcaactgaacccgcattttctgctcaatacgctgaacaatatctatgccttaattgcttttgatacagacaaggcgcaacaagctgtgcaggaactaagcaagctcctacgctatgtgttgtatgataatcagcagacctacgtcccgctaggcaaagagactgactttatccgcaactatatcgaactgatgcacatccgcctgtcttccaatgtacagatgactacgcagattgatatactgccggacagtcggactcttatcgcaccgcttatctttatctcgctgatcgagaatgccttcaagcacggtatatcgcctacggaacggagttttatccatatccatcttgcggaaaatgagacggaagtgatctgcgagataagcaacagcaaccacccgaagaacataatggacaagagtggttcggggataggactggaacaggtgaaccgacgactggagattctttatccaggccagtatacctggcagaaaggaatttcggaagacggcaaagagtacagatcaaggctgagcatccgtgtgagggagagtattaataagtaataagtattaagtaataggtaataattgagagtatattcggtttaggtaattaaataaaatatagagaattatgatattacgttgtgccattgtagatgatgagccattggctctgggcctactggaaagttatgtgaataagactccgtttctgcaacttacaggaaaatattccagtgcagttcaggcaatgaaggagttgccgggcgaagaagtcgatcttcttttccttgacattcagatgccggaacttaacggactggagttctcacaaatggtagattcccgtacgcgtatcgtttttaccaccgcattcggtcaatacgctatcgacggttatcgtgtcaatgcactcgattatctgctgaaaccgatctcgtatgtcgatttcctgcaagcagccaataaagccctgcaatggttcgagctggtgcagaagccggaagagatagacagcatctttgtaaaaagcgactataagctggtacaggtagaactgaaaaagatcatgtacatcgaaggactgaaagattacatcaaaatatatacggaagatgatgccaaacccatcttgtcactcatgagcatgaaagccatggaagagcttttgccttccagccggttcatacgtgtacaccgttcattcatcgtccaaaaggacaaaatacgggtgatcgaccgtggacgtatcgtctttgacaaaacgtatatccccattagtgatagttacaagcaggtttttcaggcatttttggatgaaagaagctgatgattgtctaatttatcggcaaaaaagtgaattttgtcgattatagtttgtcagaaatcggttttatatgtaactttgcaacgaacagaaagggattgtgaaattccaagaatagaatagtttagttaagtctagtttagtttttgtgttgatcggaagcctgcgagcgagcatgagcttccgatttttattttactgatatacagcatattaaaagcataatcgaactatttttcttatcaattagtagtctatattagagaacaaaaacgtcacttttgacgctataaaatggtcggattatggtcggaaaattccccgattagaatctgattataagcaaattacaataggatgttaaaaaaataatggtcgaaaacgccatttttaccctaaaaacacaaattatggctacattaacattggtaatagttcccgcaaagaagttatcagacgggacacacaaaataagaattcgagtcgcacacaactctgaaacgagattcatcaccacggatatagtggtaagagaaaacgagtttaagaacgggaaaatagtacaccgtccagacaaggattttctcaatacaaaattacagcagctatacaacctttatttcaagcgatacatggaactggactaccctgattcgctcacgtgcacgcaattagtcaaaatgataactaacccattaaacggagaaaagcaccgtaagttcgaggatgtcgtggatgaatatctgtcccaaatagatgaagaagaacgtaccaagacatacaaactctatcggctggccacaaacaagtttatgcaattcatcgggaacggttctctcatggaacatattacccctatcagaatgaaccagtacatatcatggctcaaaaagacaaagctgtcaagcaccacaatcaacatctacataaccctgctaaaggttattatcaactatgccataaagatgaaatacgttacctacgatatcgaccctttcatcacagccaagattccatcaacccaaaagagagaaacccaaattacagtggaagaactcaaaacaatcagagatgcaaatttagagcattacaatctcaacgtaacacgggacattttcatgcttacttattatcttgccggcatgaacctagtagacatactagcatacgatttccggacggatgaaataaactacatccggaaaaagaccaaaaacaccaaagaaggggactccctgatttccttttccattcccgaagaagcaaagcccattataaaaaagtatatgaaaaagaatacagggaaaatcatattcgggaaatacaagaactatacctcctgctataacctgctggccaggaaaatcagtcaattaggcaaggtggcaggaatcaggcataaattcaccctatattcagcccgcaaatctttcgtccaacatggatatgacctgggaattcctcttagtacactggaatactgtatcgggcaatcaatgaaagaagatagaccaatcttcaactatgtcacaataatgagaaaacacgctgataaagcaatcagggaaatacttgacaacttgaaaaatgaataatcacatataaaataaatcactaagaatttgcataataaccaaatgcttattatctttgtagtgtcaaataagagttcttaattttaatgtttaactgatgaaagatgaagaaaaaaaagaattagaacaagagtatgagaatttaaaacttctcgcttcatttcacgaggcctatggggttcctgaaaatgccaaagaacgggaagcgcttataaatgacatactcgatcggatgaacgaaatccaagagaaattaaaaaagttgtaattaacatccctcccttcggggagggacaaacattaaaagctatgatagattggaatgattgcctgccaacaaaagaaatgcaggctgactttgaaagattcaaagaactaaaaaccacagaagaaaaagaagctttcaaaaaggaaatgcaggataaatataataaactaccggaagcccaaaaggaagcctacaaaaaagcatctgaagctgggctaaaagcaacggtaaatgcctgcaatgattatatagaaagagtggaagaagccatattacgtgataaacttggagaattgcccgaagcaatctcattcagttatattgcaaagaaatattttggtaaaagtagaaactggctataccaacgtattaacggaaatatagtcaacgggaaaaaggctcgctttactgacaatgaactcaaaacgttcctgaacgctttgaacgatgttagcgaaatgattcatcagacatcattaaaaatcagttaagctcttatttgacaccatccctgcattgagccgatgcagggatttttattgtctaatcgaaaaataattgtatctttgcaacatcaagataatacggacataattcggattattttggtttgactttggtgagggggtggttcccctcactttttttatatccacgatcgaacttttcacttatatattagtactatcttatgtaacccttcttgagagtttgttgattcgtgtgttgttgattggagggattacaaaactaagaggtagccgaatagctacctcttataaactctattatgattgctacttagtgagaagaaagccctagaataaatactcttagtactttcttactttctgatgtcttgaaagaatataactaataattaaatcgattgaacttttccattatcaataagccaacgttcttggaaacttcttcttgcggcccaacatatatcatttataaaagcaatattcatagttgcaccaacaccggcacctataagaggaattgcttgaattgcctttctttttgtgatattaataccaagttgtttagctagactcttgattgtaatcaatatggcttcattacaatacttatttacagtagctttttcagccatttttttccaactttgttttacaagaataacatttaattgtttaagagtaactaatgccatattcttttcttgcatagaattagaaccggcaacagacattatagaatatacaaattgagtatcttctaatgttaatgctttataaccatagcaaattcctattttatgtattgttcttaatgcaatagttacaaccataggaatatcaacaaacatacctggtaagccaaaaaagccagcgactcccccttctagaccaagtccggccaatgcccaattatgaacttcatctgctaacttatcggacaattgaagatcttttgtttttaactcaattattgaattaacttttgcatcccgtataatatcttgttcatcagtaattaactttgccaaagtattagaacctgttagagcaccttgtatcgctttttgtgggataatcctatttgcaaccagaacaataggcttagtcatataacctacagctttggaaactaccgatggttcagtagctttccaaattttaatatctttaatttgaccttcttcgtatatattcatctttttacaaaacctgttttactactttattagtttaatccattaaaaataaatttaatttctttccttaggttaattacctcacaaacgcaattgtgagcatatttattttcttctgccatagtaattagtcagtgaccaaatagacagtatttcctagtctacgaaaaagcttatcgtagtttttagtacgcccatggatttgaaaaggagtaatttcacttttatctttcttcaaataccatttattttcatttagagcatttgcaatctctgttgttgtcataggagtacccttttctttcaacaatttaataatagcttcgtgtaatgtcatatctttttaatgctgtttttggtgttttttatcatacatgagtttagtttgaaactctttcgttatttcatcttctgaaatgatattttttgataaggtccaaataatgataggacttccatcatcataacggatacctactccaattgccagccaaatttggagatgaagttcatagccaaaactgatgcaaaggtataagaaagccccgaatcaaagagacgggacaatataaaaaggacttatcattaatagaacataacttatctctaaaataataaatcaataatgattgtttggtacaattactttagaatctttcatcatactaatatatactttcaaaaatgcttcagcagtatcaagattagactcaacattagaagggttatatattcctattccatctgcatcttgcggttttgtcaaatgacttgtataccagtaatacaaaccaccttccttttcaattcttgcatacacagttaccatattatcatatttatctttcaccgcataagtgaatctttttattgttttagccatatgatgattatatttataagatatacagattatatactcaatcttaatttcaaattagtttttgtaggacagcaaaatctagtaagaacatcaataggcaaactaaatgcagttgccatttcctcatttgagtattccaattcattcttatgaagtttataagcttcattgtacatattcggcatatcaatatatacactcacaggttcgctttttctatatcctcttctacttagttcaatactaaaatatttatatttttcgttagtaatacatttcaaatcttttgccctacgtacaatagatgccatggaggttaaccaatatctttttaattccaccaaatactgcagttttagtccacgtaaagaatttgatatagcatcagaaggcataaggaattctgaagcaaatctatttgcttcatcttctttatccctatattcagagattagaaactcatttgaagtatgcatgatcaaatgtcccagttcatgtgctaaagtgaatcttttatgatcattactgaaattcttattaataataatcacataatatccaccatctgtcaaaaaagaaaccccgtcaaatagatccacatcataatccaattctatgattataatcccatttctttccagcaaagagaatatattccgaaccggttcatctttcaagcctaaatacttcctggtgtactgagccacggtttcgggtgtatatccatcttcaaggtcaatcattcgaaatgacatatctggaaattccacagactcccccatttggtctacaatataacctaataacttatttgaaaggtctatttgggaacgttcatttttagtcattcctttcttccttcggtaatgcgcattttctgcaatatttgagattttcttctcataaaagtcagttggaaatcccagaaaatcaattatgcgattaagcacatcggtagataaaggaccaatacccttctcatacttagataaattggattgtgacaatccaacaatcttagaagcaagctcggtttgtgagtaacctcgatattcacgagcaaatattatctgcttatagttgatttccatttttgctatcagtattgttgttttctaaaataaattcggtgatgtattatattattaattatttgttccttctttctttttgatattttggcgtacagagagagacgcagcggctggctgaacatccattgttctattaaccgtaaaaatatcattttcagaaatagtccatctcactctgttttcatcgatataaaccaattttggatttataatctccccaaaacgacttttattatatccaaaaaataaaataggctctgtcccgttatcatacatatcaaacaaataaccttgctcttggttctgaatagatgatgaaaaacgagttggaacattcattggcatatttttactatttaatttcttaaaaagcataatatatccattaactctaagcataaatcttttgtactttccaaatgtccagtcatctttaaaaacagactgaacactttgaattatttttgagtttaagagggaggcttcaaatcctcgacaacgagctgtaaacggggtttgtattacctctttttcataattacgtacagcattccaaaaagcatcaaatagcttttctaacgactcacgaagttcgtattcacattctttagcgtttattatacgcttccttttggctgtttcagccacattctttatttttgccataaaaataaaattttatatttttacatcaccgaatttaaagtttatctctgcgccaacagagatattcttttgctgcaaagatatatattatttccacaatattgtattttatcacatataatttcgccccaaaattgtattttcaataaaagaaaggcttatttcttaaatttacaccccaaccatcccgcaagaatcaagccaatgacatagcaataaactttatctttatgcaaatcccaccaagataactcgactaccttctctctttgatttagtaaagcattcaccttgttatttatagtatcaagtcgattcgagaactgctgcaaagtaatggataatgtttcatcaacttcactccgttcttgctcctgtttggaagcggtggtagtactttctttgactagatactgttttccggttgaatccggaagcgacaagtaaactgttttattctcaattttcagatcactcaacttgtcagtagtaactttcgtttgcttattcacatccagctgtaatgattcaattaagtttcgcaaatacaaaaaatctcctgaatagtcaatctgcttttgtgactcaatgctatgagaagttttgcaggaagtaaaccatattcctgacatcaggaacatggttatatagattagcattttcatactttcagatatttacaaatacctttcacatgaagagaaacaatagtccgtttcccctcctctgacagtaggaaatccacatcttccctgttatcctgaaacaaattttctgtcagaacagccggacacttcgtatgcttcaagatataaaaactactctccttatcaggatcgccatctgccatatctttccgtatcttcattccaggcaagcattcttcagcagccccatacagataatcagccagcttatcggcttttgtctgccccacactggtccatgcttcccaaccacgtgcttgcatccaaattgaaccattaccggctgcattgcaatggatagaaataagaattgcttcagaagtcttatattcattcactcgcctacaacgttctgacaaaggaacatctatttcctctttcacgaccagttccgcatcaatacctaatttacgcaattcaaatactacacgcccagcaatttcacgggtataagagtattcccttaacctgccatctggagaacacttacccggagtattactaccgtgaccgttatcaatcaatattttcatatctttcctctttatctagttcgttttcgattctatcaataattccttgtacgtgcgtaggcgtagcccgcttaaattcaaaacgtattacatgataaattatacgaaaccctttgtttctaggataagcaataatcagattcttaaatgcgttctgaagatatacataagaaaatacatacgtaatagtcttaataactaacaatgagttctcaccgtctcctatcaagctcataaaggagaagactacctcaatgattataagatagagaagaagttcaaccaaggcatttttaaacttatcccacttaaagtttttacaacgtataattgaaacaccatcagccctcattccgcaccaaatattaaatccaaacattacaactaatgctataagaaaacctttagtcggcgttaaataagcaagaagagaactgaacatcgaaacgaaaataattcgtatctggtctacattaaatagctcatataaccatctcataatattaatcataaagttactaccaatattgaaaacacagtaatcagcccaggaagcaaaacagtagctaatgcgtcaagccaatcaaagatgaacccgcactttttctgaatgtactcaaccactattgcggcaatggcggttgtcgtaaaagaaacaatagcagatttacagaaatcaatgcctaatagaaggaaacagaaaacaagcattacaacaaagacgaacatcccggctttgacgtgtgccggtcgattagattgcaaaatccaatcatacaatacttttatacccatactcatagcgtttaattattaataaaatattctgtatggaacaaatgtattgagtataataacgagttttacaaaaatggaaaatcttggaaatcaattctatgataaatatctataaaacaagacattataattttcactttttccataaataaaaaagggatgcttgaaaagcacccctaaaacaaccaacagattgaactattaatccgtaaacatatacacggaaagatcaaccttttctatttcgtctgaaatcgtatctccatacattgtaagacacacccgataacggtcaatacttctttgaatctgttgcaaggtaggtttctcgggatattccgaactggcaaaagttaccagttcctcaccattctcactggtaccaaccacccggaagtgatgacgcacaatccaggttccgtccgactgttgctcgataggcttagcaatcccacgcggtaagatatttttttgatccatgttttttgatatgtttaattagttgttttctatcgttatatttattcttcaatacaaacttttcaaaatgtccttcgatataaacatattcccaccattcaggaagtaacatcgctgcaattctacggcggatattgtacgttgcaaagtgtttcatcaagccataataagaattcattgtactcacaaatttctcaacatacgcttctgtaaatccattttcagctattttattaaatttcctgacagcgttatatgtgttaccaaccaccctgttagatacataaattctaccaggcaaaatgaacgcccctacaaacaagactccttttttataatgctgaagatacagtttgcgtggatgcaaccgtaaaaggagttgttctttcaggaaaccatcaagaagatggactttggacaatatttcttccggagatttcaccacaatacaaaagtcatcaacaaagcgtacataatgcctgaatcctaacatcaccattacataataatcgaaaacagacgccaagaagttagctatgagttgtgacggcaggttcccgatagccactcccctgtcagggtcattatgaaacagacttttattactgggaagtttgtcccacatggagacgggagagcgtctgatacacttattttgtggacaatgaaagatagtaacggctagaaggtaaagcagacattcaatatcatcgcctttataattgtcccttacgaatatgttcagcatttcccataccaacgatttcgagatagacatgaagaaactgaacaggtcatctttgaaaatgtacgcatcggcagtataattctcactgacctcgactatcatgttattcagatagtgcacggcagacagacatccctcacctttccggcagttcttcgagacgttcccttgttcccgaaaacgttcctctaaaatcggctcgatacgaagagcgatccagtgatggacaacacgatcaatgaaagcggcggcaaaaacctcccgatataccgggtaagtccgtatgaatacttttgaaaagtccggtacatattcaccgtaaataatagaataccatagccgcaccaatgcggactgataatcattataaaactcaacacaatccgtactcgttcttttctgcctggcacaatcttcggatgcttcgaaaatactgctaagaagtatgtcatagattatattacctgttgcggcgaggggacgaacccggttcgcgttctggcggttgttcgtgttgacgttgccgttgttgaagttcacgttccaactgctggaagccgttgcatccgctatcttagtctttcccggctcatcaccggggggatgcccaataaataattctaattgctcactcataatccccttggcgattatgactccggctttgcgacttgttgcgatccgttagctttttgccgttggagatctgcaaccgtttttttgtaccaaccggtactttgcttaccgatgctctctgcaagcagacagatttcggcagtttgagtcaggctggtcaaatgtcgttcttcacacactcttagcagtaatttcaatgcatcaaactcacacaaaaacttcatcagataatctgcacggtgctcaaggttcatatctgtatttgcataacggatatattcgcaacaatgaacggcaagcatcatcaactccgtaccaaattcataccggaacgccttggggaattgttgccgggcatcaatgataaggttcagaagcttatacatcgaatttgatataggaaggtcttgtgtaagtgccatgttaattttttaatattttaatgtatgtattagagggcacaaagttaataactgtaaagcaattaacacaattttagctcaaaaaagtgaaactaaaaagcccctaccggggcttttatttagctaactttctaagggataaagaattaaagagataaagtgtttattgcggcgaggggacgaacccggctcgcgttctggcggctgtacgtgccgacgtagccgctgccgaagttcacgccccaactgctggaagcgtcatattcggtactagaccaataccagtcatttgtaaatatattttgattgccaaacatagaagttatgagctcattgatttcggttttatacttgaccataagcataagttcacccaatgcgggcaggttccacacggttgtatcttcaattccgtcagattcaagcgtacaggctttataggctctggcaacttcggcggcaggggcgccgacagttccctgggtgtccttgacgcctgcaagggtttctattataacatcggtattttccttgccgtcgaaggtatcatagagtccttggttaccactgccgtagtttttcaggccgcgtaggtcagttccgtagccaccccatttgaacgttttattgccgcctgcgtcaacgcagtcgcttttggcgataatgaactggtggcattcggcgcgaagtcggatgccgatacggatatacttggagcgattattcgcgctcatggagttccattcggaagccgtgaaaaagacttgttcaccgtcttcaatccggagcgtagccaaagaaaggtcaagaagcgtacctgaccattgcatatatttggcgatgtcgcttgcgggggtgttttcattcacggttgtaaaacctattgattttaaggcttctatctggtcttgtttattcaagcgcagaagcatggcgctggcgatatttttatccattttattgtataatattaagttaatactattcggaagcaacagctctcacatgaagaagggctgaatttttgttttgattcgtaatacgcccggtattcagttcgaacgcccaggcggagttagtatcccaaattgttgatgaccagtagtatttatcagtcatcagcatactgtcactactccaaaaggtacgcatcatctcattgattttatcgcggtagcggtacatcagaagcatttggccggatgaaggaaggaaccagttggattcatcctcgataccgtcactttccaaagtgtaggcacggtatgcacgggcggcttcggcagccggcgcaccgattacaccgctattgttttggtctttcaggccggtgataatcaggtcggtatcttcctcacccgtgaagcagccgtacatggcacccagtcctttttggttcaggccgtctatggctttaccctgaccgccccaatagaaggtagtagtcatatcggcattatagcactcctgggcggcgattacgaaggagtgtccatgggcacggatacgaagcccgcgtttgatatacagttgcttattagcgagcgtaagggagttccattcggcagcagtaaagtatgccttggagttatccgaaatacgattacaggcaagatgcagatcaagcagaccggcggcccacttgatacgttgtccaaattcagatgcgcgggaattctcggtgacatccgagaagcccacggcgttcagtgctgccacttgtgcctgtttattcaagcgaagcagcgttgcgctttgttcattcgtcatagttacttgttaattaaatcattaatatccatattgtcttcagcaaaccgttcgagatattcctcgtaggtttcgccgttataatattcaaggacttcattgatgttgtccagcgttacgttatcgtagtacggttctccgccataagactcattattgaaccagttgatcaggtcgatgtaggcatctatgacggtaaggatgacaaggccgtcgataccggattcaagggattcgatttcatccgtttcacggataactgtcagctcatacgtgccgttgactaccggtttatcctgtctgttgccgtcctcatccattccggcaactccatattcgagaatggcaagaagctcggagccgtcagccttcagtgtcatgttcgagatacggagcatggaaagtttacgggatgccgtttgtgaagcgaggacgtcacggagcatctgaatggcgtcaagtttaggcgacgtttcaagacgcaggcgttggacgttcggcatggattctatttgcaggccggacggggcggaaagacctgtataggtcagttcaggaagaccgacaaaacggaggcttgtcattgttgctggaagagagatgtcattaatcggagaagtctctgcaagagtgatgttctccagtttgctaccggacgcattgatatgggcgatacgtgggcatttgtcggtgacgagcgtagcgatttgtgtgttccggatatcgagtgatacgaggaagggcatttcgccgcagttcagcgaggtaagcggtgcgtaagaaccgatggattgttctgtatgggtgtcagagcccaagataagggtttccacaagttgcatggcggagaagctcaccgtacttgacagggagatttcagacaggtcgagcagcttcatgcggtcagcctgatagatatacagcaaggcgccttcctcatgtgagaagttggtgaatacatattcttcgcccgcttcaaggaagcagctttcggaaaggttgccgctagcgtcattgccgacaccgaagtaaccgtttttagcagcgacaatccggatggtggcgtttgatttggaagatacgcgcccggaaattacaccgctgaagaaatcaccggtttggaaatagccgtcacgaatacgccaacgtctttcgatgaaagacggaagggcggtaagtccaagaccttgcagggcatagaagtaaatagcatcagaggtggcggtataggagatgtatttccgttcaccgtcgtaagaactaaccagtttctgccattttttgagccgtttgtcaatgaagaaatgcgtagctccttcgggtgagaacgggtgcagggtgacgccgtcaatggtcgcctgaacgttacgcatggcggcggcaacggtacgcagggagagttccgtaccggatgagtcagtccacactacttgctggagatagatgttattaaacagaacggagccgtagccagcataagggttagtgaatgtttcatcgctcgtccggttggggtccacctcggcgtcaaccgtgcaaccaccgtcgttgtccttgctattgagcgtatcgcagtcatagattttattcaggtacatgcgcatggcatcctcggagctgtacacaccgtctgttacggaagcatactcttccaagaaccacatcggctgcatattcttggcgcgttggtcagtggcggcaaggtagtcggtgaagatgtcataactcaagacactttctgggcaggcgaatttatacaggttttccttccatgttctttgccagttcccgcctttggagtaatcgcaggaatcacagaagcgcaaccatcggtagaggttatagggcactttcttacccaaagcgtaatcaatggcgagctggtcatcatcgacaagcgattcaaagtagtaagtccatgccgggaaggtatcagcagagatagttccgttatccacgagtttttgaacccatgaggacttgtccgttttcatggccatcatatcctgaacagaaccgacgccctgaaaccagtccataccttggtagttaagaagttcgaaaccttcaaccggattcagaacgtcaccggtgacattccatttgccgttttcatacttcatggaaccggactgctttttccatgagctgtcctgatacctcattatccggtacgaactaccgcaatacagggaaagcaggtacacgctgtccgtatcgagtccgtcagtctgtttgaagcgtatctcaattgcgtctaaagtttcgtcaggagtaccgaagaactctatgaagtcaccataattcaggcaacctttgttatagccgggggtatctttgaagccgagggcgaactgttcccctttgtcttctttccagttgcctttggcatggaaatagacgttttgcaggctgtcatccttacaccgataggtggctaccgggtgattggcggtagagtggttcatctgcaagtcttcgatatgcaagtcaccgctgtcaaatgttccgtcaaatgcacgttggacaggtgtcatatagttaccacctaaggcacggtatgtaacgttcatcatttcacaggcgccgcagtcgttcgcattgccggaatcggagtaatcgacttttacggtaatgacatcgaccgggattgtattatcaccgacctgtactttgttgatggcagccaaggctattgcacggcgtccttcctccgtcgtatcgtctggattaagtagtatgattcgagtgtccttgtttttgcctttgctcttggcgaggtagtagcgtttattctttaccgggcgtttggcagaggtggttccctggttgcgggtttggacactcacggccttgaagttacgccacgggcgttcggggtcaaagtaatagagcgtgatgtatatcttcgtactggtggaagtggtgccgtccagtgcttctatatcggagccttcataggggcattcgacaatgtaaggcataccgcgtgaatagatttcggcagccgacgggcggctttgggtactaccctcggctgtctggcttttaaggatgtcctcaaaggcgtattccttcaccattacctctgtatcggtcagacggacaaggtagttcttgaacgcctgtgcccattccatataggagttccaggccatcatgtaataaagatacaaatcacccagtttgccgtccatcgttatatacttggtctgaatcagggagccgccgcccggaacataaccaaggcaggcgacttcctcaccgttgaggaagagtttcatcatggaataccgtgtgccgtcacgttcaacgtagttgcttgcaggttcaacaaccacggctacggttatcttttcaccctgtcgataggcgcgttcttcacgacgggaaacgccattgttacagaagatgccgaccacccggccggtgacatagaagccggcaccggacgtttcgtcatagcagctaaggagcagggcatcatcatcggtcacgttcttggaagcgaaagcgaactggatggcggcaccgttggattcgatggacgagccggcaaacggggcatggtttaatgacacgcccacattctcggctacgcgaaggcagttctcacccaagaatgtgccaaaaccgttggtagtccagttggcaccgtccactttcatttcataattaccgctgacaatgctatggtcagtttcctgattggtacgggatgagaagtcaaagttatagatggcgccttcttttatggcggcgtcaatggcggaaccgctaactgtcacccggacaggttcgctagtcacgtccttgcatacggcagtatagttgaccgtatcggtgccgtcagccttgtagccctgcagttgttgtttgacctgataggttttgttacgactggcagcaatttgtgttacctgcacgttattggctttcacgctgacgggtgaagtcatttccaacgggtcataacaggcaacatcaagttctacggtttcgtacagtcggactactccaccgtttttatcatcgtatctcaaggcgacaagaggtgtggaactattcgggtcaattaccatgacagccgtgtagatgacatttcctttcactccggatgcgacatccgttccttggatgcgcaagggataggtaccgtgttctaggccgagggaagcagggcggattacaacggagtgcgagtagttgtcatttacaacggtggtagacagggattgccattcaccattaatcttgatgtcaacctgggcactgatacctttatcagaggtgttgtttccgaacttatagagtggaaggctgaaactttcagttgtcggagtaagcagagtttcaggggtatagttgagcacctgcacacaggtacaggtaatatcaacagctgttacattgacattcttggaaccggtgttgccgctttcgtcagtggctatcagcttgaatttccgagtaccggcagccgtaaagtatgtggtgaagtccagttcaaaggagaagtccttcatgtcaccggaagatgctttgttgacggtttcagtccagacggtaagcccgctttcacggtctacgagttccaatttctcaatcaggttgtcagaggattcgacaccgttcgaggtcacagaacgaatggcagcaaaggttcgtaacgtggagccgtaagagccatagacaggtgtcgactggaaagcaatggcaacaatggtaccgccagtttgaccgccgccacccgtgccgatagcgaactgcacttcatcaccaagggtttcaccagcagcgttcttcatctgaagttttacgatgccttctgtttccacgtttacgtcgaggttggccggaacataggcataggcgccaccagttgaaaaggcatcctttcccccttctgccggttcatcggaagtttcaacaacggaaccgccaccaccattcccgaagggtttccaaagagaaggggtcgcaaaatcggacacagcaccctggaactgccgggtttccatttcatactcgcctgttttgtaagtaatgatgagacccgttcgctcatatttgacgccagattcctgttgataggagacaatggcggcaatagcggtttcaagggtatagtggccatctttcagagggcggatctcatcaacaatgacgatggggtgtgttacatcgtcggcgggcgtgccgctcttcatatcctcaagggcttgcttatcctcggcggacaaaaggccggcttgttcaagggtagcagaaggcagacggaagctgtcgtccgtttctttaccggttgttttggacactttcttaaaatacacattgagataggaagcgtcagacaggacggagaaagaacccggtttgattatatcggaagggatatttttcattgtatcttccaaagactttccacggttgccggggaaagcttcttcttcaccttccccaagagacaacggttcaggcagacattcagaaggaactttactttcttcgttcaaaggagcgataccgttcgcttttcctatcctttcctcaaagtcatttattacagaggtccatttgccccatgtaacactctcattggaaacaatacctattcgtgagattgtacaaactgtacctaaatatacaccttcggcattgtctgacatggtagccagttgtatacacgaagtgaatgattgacaaaccttatcaagctccaaccgttcaatttgtatatttacaggaatcttagacgaatcaacagacaaaatacaccgataattcccaatagaagaatccccggaatacatcgtttttaatttatctttaaagctaccaatagtagtaaaagagccaatacttttaaatgggtcagtcaaaggattggatttatcagacactcctgttatacgtttcaataactcggcgtctccatccgataaatcttttgcaatcttattgacattctccactaatgcatcaaaatccccattcaccattttagcaatggtacttgaaagtaaatcaatagatattttccgaccgccactaacttcaacgtacatatctttggatagctctgttgtatcagtcagttgctctattgtaagactgtttgtcttcaacgcttgtaacacaaggctaataatctgttgtttttctgtttctgtcataattctcttttttaatcattttcatatacccatacaagctcaatggtcataccaagattatctatgtcgcaatcatagacattatcaagataaagttggaactccttcagagcaccaatatctccaccgttaatacctttcaagacacatacaccatccctactgattacactcccttcaatgaggttagtatacgaatctcctttatatagtacagcacgcaaatttatcgaaccgttgtccaaatcgttctttagtctatccagtccattaactgtaagtttaccgtaacctcttctaccaatatacttgttatctatgtcagtcgtcttgattgcaatcaaatcccaatatgaattttcatcaacacctaggtgatgaatactgttgacagtaaccatagtatcactattaatagaaactccagtattaggaatagccttagtcatattgatatatgctccgacctctgcaacctcactttctgaaccatacttgatactacgcattccttcatcatctgctatcctataagcaccgctttgtacacacctcatagcaagctggttattccattccaaaactggattcatcgttcttaccttctgtaacatttgattgaacacaaaactcttcaatccctctatttgctggttaagttccggaacattactttcctttctggtatatcggacaccatcaaagtagacgtaattacagcataagacacgattcaataattcagcaaaccacacagggcatcccatcccatttccaagcgtgaataatactgttgtatattcgtggctgaatagctcaacaatatcctcatcagaggtcacgaactgctcattatccacaccgaacgtccatccgttatctttgaaaccaccaggaacgcgaaaatcaaaaaagtattgcatcccatctatccaccagacagcatcaagacgctgcttattatctttcattgaatactgaataaggctggtttctgataactcacattcatcgtccgtaactttaaaaatctcactcgtattcccattaactgttacagtatagtatccacatggaagcaatgaaatgttatagaaataaagaatcttatcatcattcatcttccatgagcttaatgatacaggtgtagatatattacttaaaagattattaatgtatactataggctcctgctctttggctgtcaaaatcaattcaacaaaaatcctgtctgtacgtgcgaataattgcacatatttactcttcgctccaaatttatcggtagacggagaaaaaaacagtggggtaaacgggcttataatcatatttctaggcttttgttattgaacggacaaataaatcatacttcactccctcgtttctctcaactgtactactcacctccttgatgtagccctcgtaaactagatcatcttttaagattttaatcgtttcatcatctgttggtggaatatcttcattataagttgtgaatgaaacatctccacaagttataataccactttcaacgttaaaatcatctttcattcctataccattgacaacaacatcactattaccgtcagaagaagaataagatagttttttagtgaacataccaatatagccggcatttgcttgcaatatgcctccttgccaatacatggtattaaacatcgtttcaggatcaagtacgccacttatttcccaaccgctccttataagcctatactctttatatgtttgtactccgccattatcatgtaatgtagtactggcacaaacaaaaaacacatcattgtcactttcactatccgttgtatcttggcctctcttttgcgataagaattcaattccataaacatcagcacggtaagggctaatcaactctaatacattatcagttatatcaatgccagtagtatattcagtagtaaatcggaattcgtcacgaccattcatactttcatagtcctgtttatcatatcctaccctaaccaaagaatatattcttgatgaatcaaccttatactcaaaactagaaaagctgctatttaaatcctttacattgttatcactaaacaatttgtcccggtgtttaaaaaaaacagtgacaccattgatcacaggcacaaagccaaaaactgtttccatccagtttttaaactttgtataagaagtatatagcttagcttgggggattccacgaatactttcagcagctaatatcacgcaattatctaacctttcatcaacacctgaagctatttcaccatagataccttcatttccaccattcatgcttttaagcaatcggtttaacacatcaataggtcttattgcatccacatagatagggttagctcgagaagtaaagcgtgtctcaaatttgaaattacgaaaataaatattgccagtagaagcattaactctgttaaatgttaccttcaaatccaaaaataaagcctgccctttagtcagatgaatcttgatggattcattcagattacttggagtaacatcccccttattatacccccatcttttcaactcgactaaacgaccatcttcgtaacgcccacctagaacaatttcagctttagttgtatacgcatcactataactgatatagtattcaaaactaaaattcaatactatatcaatgtcggacaaggctttaacaaatacatttggatcatctttcgattcctgtggtgcatcataaaactcaagaggtgaatcccgtgacggaagttcaccacctgaaatatataagggaagcgaatatgttatagcttctacatatattcctttgtcaattacaatatattgcaaagaagcatcattttctacagtattaccacctaatgtatgcggttgactataattcatacttacagaatcataataaagctgatatacatcttttatctcatctaccgaatattcgtactgcgttcctttgttagcctttatgatattagcgacactatcatctatcgaattaatagaaacagtatttccatcataggtcaatgaaccgaaatccagtcggcaactgaagaattcttcataagtatgagaattagttatagtataaacagtgatactagcattagaagccaggtatttgctcaaatactcctccaatatgagatcataggcttctcccacaaactggaattttgaagtaaaggttctagttattccttcaagtccggagcgtttacgggaaaactttatttcatcccaattctgaatacaagatttgggaatatcataagaaatactatcaacggtaagtacatatttacaaagcattttaactccttttgaacgttcacgagcaaatatatagaaaaagccaaccggtttcccgattggctaaattcttgaaaatcatgctttgctaaaatgcaatataactatctgtttttcaaaacaatatctataccaaggaataaaaaggacttttcaatgtcctacatactaatctttcccttttaaaatgtcatagaaatgttctacaggttaaatatgcattataaaaacaattatattaatgcagaaacagtacgtacccctttaaatagtttccctagttccttatgtttagtaaaacaccaaccatgaacttttaaaaataaatctaattctgcttgtttaggtttagccgtatatgctcctaatacattcttcctatttgttttaaattcaatatctgacaattttattgccggtatattgcaaattgtatatataaatggagaatcaattaactgatatattaccttatatatttcaggaggaatgtaatatgcatatttcactagaatttctcttcctccatctatcattctttgattctcggaaagtaaatatctttcccaagatatttttggggtaacaggagcaatagcatcaagttgcaaagaatcataaattcttcgaaattcatcttccaagaaaatacctttatctgttttaggggcataatatccacaatcacggtaagccgtttgccaaaagctaataaatttattacaccaaagagttacatcattatatgccgcaaactcaagcggttttttctttctaacttcaattcttcgatataatctatcaattaccaaaactgtcagagcagtcgtgctcacatttacaaaaaggcttattcctatattattaacaagttcttcttctctcaacatcaatacaaaagaaaaaatcaatagtgataatatcactaatattatcattttatagtcattccaaaaatctttcatatctattcttttcaaaaatatatctattaatccaacaataatttattcaccaattcacccaatagcattaaactcggatatattacaaatataagttttttttgtatatccacatagaatatacttccataattcattctattgctataaatttacaaatataaagaccctcaaattttgtaattcagaacactttgcaggttattatgagcatatataagttaccattttgaaaccttactcattattatcctatttcttgaagtataagcttcctgccagaagaaatacgacttcttacagttccaacaggaatgttcaggatttcacttatctcatcataagaatatccactagcataatacatcacactatcaatacaacgggattttttagcacaccgttgtattgtggaaaccaaatcatcaaacagtattgaatgagctgtacagttagaaatggcacttccgtctaccatatcaagccctgtaaaatgtataagggaatttctattgtatcttattatataagtattcctcattataataaggcaccacggttgaagtggtttagaacaatcaaatttatcacgattcacaagtagcttataaactgtatcaccggctaagtcttcagcatcttgcatggaacagcagaattttcttgccacctttaatatccaaggatatatttctgataattccttttcaaagtccattgtcagccctccttattaggtgtatcttcggttcgccattaatgcacctttccacgtattcccggtgcatgatactttgctcgtgcatttccttagcagaacgctcgattgaactaataagagtgcctatatcggggggcaataaggcaatcattttttttacctcggacacttctgctgttatccgattacacttcgtctctaatgtacgtaattctgacaataaaacattgtataaatgcctatttatacaatggatgctgttttttctattcataaaaaagtcgtttgtgattctaaaggagatgtacaaacgactgtatgaaataattcgctttaattaaaaattaatcgaattacagcatatatgtaaataccaatattatcatgtgcttctttttctgaacgatatttcaacatcggcttgatgaacaatatttgcgtagacagcagcattaattacacgggaatctatactcattttaaagaatgtcattagaaaagcaatctcggcatcgaaagaagaacgaatttgttcaggagtaaccttatttcctttatgttcctcactgcgtctttcctcattccgtttttgctcaaaaattgcagaatgaaacaaatagtcaatcttcgatgttacctgttcatcactcatattccgagaatctacatttagttgttccaatacctgacgaacatcatcataaaagccaagagaaacaagagtctgacatatacgaaggctcaatagtttggcacgttctttcagcatatcctccttgtccattaccatagccttcatatttgaaggattaacaatacttctgtattcaatgagcaatttagatgctatctctttaagcgtgctctctgacacaaattcgcgatccgaaagcaaacaagcatagtttccacatgaaagctcaatgaaatcattcaatgttatctgatttaatctttcaatcatgactatttcagtttagataacttatacagttcaaattcacggttagaagcatcctggcgttgcatttttagactcttcattaaaaggagatttgttctatcaacccttttttctaaccgggaataatcattgaaaacaatggtgttaccggaagaggatgctaaatatgtcggtgaaaatgtaggaaagtcccaatccggcatatcaaaattagagatatctaccttatcaacatcaggaaagacttgcgcacctttaggaatatcaactaaagttggagtatcaggagtaatccatgcttttccggaatacatgataacttcatgtttaccggcatcaccaaccaaagcagcaccgccggggtgcctatcattacctttagtaccttctgcataagaaggaataggagtggcaagaattgttgctacttgcatagcccccatcgccccgataacagcagccattacagcaccggcaatcggacctaactggaaagcttccataataccacgagctgttgcaattccagtttctgcaacttgtactcccttatgccaaacagcttgtttatgggcaatctcttgcttttgtttttccaactccttattcttggcttctgtctgatcctttgctgcccgtttacgcgcttccgcttcctcttcggatatagctccagactctgccagattctcaattcgttcaatatcctcatcatacttttcctcattagcttcccgctcttcttctattttctgaatctgaccatcataaatagaagagactaagtttccaatagctcccacagcttgagatgcagtttgaagccattttttcaagttcttctgacgttctttctgtgctttctcatccgctttagtaactttattgatagcatctatttccgcttctgcttcttgctgggaaaggtccgctttcaatttctgtaactgctctgcaatctttgccctatcctctgcactcaaattttcgtttcgaagttccaactccaacgcatcaattgcagcttcggttgttttacgtacataatctaattttaactgatactcaagttctgcatactcttgctgggttatttccttagaagctaactgttttttaagagcaagcgtatccataacatatgcagcatcccggatttcctgctcatgcgccgcattctctgctattaattgcacctgatcggatgcatgtctttcgtaaagttcttgtttcttttttgcatatttttcgtcaatgagaaaaacatcttcaccagttttctccgctgcatcaatttctgcttcacgttgcaattccaactggtgcaatttcaaatcaagttcttcctgggaccccttttttacaacagcaagagcgttctcaacatccttcttctcacgatcagaattatacttaatagtaaactcatctagcttttcctgcatttccttagctaaattctgacgtgtagcaatttcctctttgctattacccttgacggcagcaatcttcttcgagtaagcaacaccaattttagcaagttctttctccagtccctcatccataagagctagttctgactcctgataagtttcatgaattttcagcttctctttgagagctttttcctgttcacgtttttctttatcagtaagtacctttactgaattcccctttgtaccaccattctctttcaaatcaatggtatcaagttgttcaataagagattctgttattgatgaaatagccttcttacctgcagcagctttagttgcaacatcgatctcatctttaatgacattatttgtgcgtctccatgaggtcagaattgtaaagaatcccctgtctttcaattctccttccaatttcttacgattatctatagctaattgataatcactattttcatattccaaacgagacttcaatgtttcaatataatcttctttagcctttttggccgcctcatcagcagacattcctgaatttatatattctttatacaacctctgcatatttctagcattcttctccaaaatatcagatttcatcatctctttctgtgcaaaggcaacagccttattgtctgcttcatcttgtaattcagaataccccttcagctgtgtagcaacattcctcaaccctcttgccagaaaatccaggacatccttcattatacccttggaatcatagaaggataacataaatgcttcccacgcagaagaaagtcccgcaatagaacctttaacattgttactcatggtatctgccatatctgttagttctttatccacgcctgtaatttggtccctcaatggaacaattttatcagaagctgtaagaaaagcattgaaagcggcgacactccgtttatctgttaattctaaagttgtatttaaatctacaccttgttctttcagtttctttaagccaacaaccaactcaggcaatgtttttacaggttctccaagtgctttagctaatttgccattgccatcagccaaattcaacaaaatattacgagtggctgttgcagacattgaagcatcaaaacctgcatctgcaagctttcctaacaatgccaaagtatcttctatttggaaattgaatgcctttgcaaccggaccaacaataggcaaggcagtagctaggtaagaaaaagataaggcactctttgatgtagcaacagccatagcagatacataacgttctgtttctttagtgctagcattaaacattctcaatgcagcaccagacaatgcggctgcatccgaaagttcagctccagttgcttgtgcgaatcgtaagatggcacctgtcgaatctaatatttcacgacgtgtaaaacctaatttggctaattctatctgtagttcagtagcttgtgcagctgtatatttcgttgttgctcctaattgacgcgcatcagtggttaattctttaatattgtcagccgtcgtacctaaaatcgctgcaagtttgctattagcaaattcaaattcaacaatggaaccaacaccttcacgcagttgcgtaaacatcttaacaatccctccaacaacagcttgtgcaccaatatatccagcagcccatcctttcaatcctgcactaacttggcttagcccaggagccatctccgttttaagcatccttcctgcattccgggcaataatacccatattctgcatggacttattaccgttctgtatctcaacccatgcagccttcacttcttcccggtatgcaccaattgtcattttctgttgactatatcgatcggaatttcgctttatgtaatcagtgttgattccaatagtagaattaagacgggcaagtgtacgaatatagttttcatccgtatctttcaaaacatcaacagccttttgcagctgcttattcatttcctttgcttgtgaacggctatgtacttcctgattagtcaaggtaatagcagttctgataagttttaaacgttcttcttcagataaaacagctttcttacgagtagtattaccggcattctgcgcttttgtcaagttagcttccgctttagcagccttttccaaggacgcagcattatccgagtttgccttggttagtttcttcaattcagcagcagataatttctctacatttagcttttcctctatcttcttactgacagtttgagttatttcagactgttttctaagagcctcggttaattcagcagatgcagaaccagccgtttttgcttgagtattataaagattactcaacttttcaagatcagcaacgccttctacatttagtttcaaaccttttgctaattctttggccgcattaacataatcagccctcacacgctcaatagtattatcaagctccaccaatttctgcaaatcgttctcatcaacgaaatcttttaattttaaatctgccataattacaggtaatgtctatattcaacaatctttccttttatctcaactcctagtttatcaaaagcataggtaccatcttctttctgataaacgacatacatgcaaccatccaagacagctgctttctttgcaagatcactgatacgttccagttcactctgcatcttttttatttcgcaactacaagccattttctaccgatatccacattctgaaaagaaacgttccatccagggacggagatacataatattaaagtactctttagctgtatcaccaatgcctaaaatctgctcaccgtatttcttctcaatagaactaccgtccgtaaatcctttcgttgagaatcgaagcccggaatcaattctatcggcagttatgctatcatagaaagtaccagtaataaagaggttaggtacctcaaccggacgcggtggcaaataaagcatctcacttctaagaggtggagttatcctctccttccatcgtttatattgttccgcacggttctgccagggaccgggctcgttaaaataggtgtcagtatcataatcaggattcaatagatgttcagtaccgtccagaccggaatataattgctcctgaatgcaatcaacgagcacattcttatgttcttccatacacctaatacattcctcttcaaacccggatgcaatggaatgaataactctatgtaattcatcaaaatctgccatacagtaaaaatataacgggccgggctgtaatcacaccccagcccgtcggttacttagttatcgcatcgtacacttccgagagcttcttcttgcggtcagcttccttcagttcctgccacacgactttaatgtgcgcattaataaactcttccttcgtcatgcccttcacagcaacctcgacgaacgtaacattatctaccttcatgacacctgctcgatacctctgattcctttttcatacaatacagaaggagctttcaacgaaggaaccgccccggctttaggaacaatggtaatgataccatccgaatatgtagcagaagttacgttattcataacttcagcagcaccatcagcaataagactgccaaattcttctgtacggtcataaccaccaacaacttcaactattttgtaagtattttcggcctccaacttttgaaacacaacatcaaccaagcctttaacgaaattcttgggattgaagtctaactgcacgtagtcaaagtgcaattggctgtcttccacatcttcatgtgaaaaactaacagtcatcgcagacttagcactactggtcgggtactgtgtcacggtcgggtaaacagtagacatcggaataccggcaaggatatcagtgtcatcattataaccgatcaacatattatcctgattccaaaagtaaacgtcccatcctttattggcacatttcagaagctgggcattcaaaacctcatcaaatttcttcaaagtgaaggtgtctgtttgagcgctaagcccgttgtattcacttgcaccgtaccctacaggattaacttgaggctctccaccattcttggcatactccaggaatggcaaaatagggtaaatacgcccgggacggtctgcatggcacaattcgagcaacttctcacctgttatatcagcagggagtttgacaccatgttctgtcaagatagcacctttgacctttttccagtcaatgctacaagcagaactaccagtgttcatccgggaacccttacacgttctaatctttctcattttcttctacaattaagattattaatttttatttccatcgagcgtatatttatggcatcaatcggctcgctcacagcctcaccggaatctgtataggctccgtatctgccatatgaatagttttctgaataactatgtttcactttttcgtcatagtcgcagtcgaaccgagaatcttcatataatacttccaataaacgtttatagattggccgaaggatatttttaaaagatgtggttctgcgcatctcattgctccactctttacaagaagaacatgctataattaacgaaacctttgcttttgaaaaataatccgcatcacctctatcctcactaattggagtgaatagtgcaaccaatggaaacttcctttcagactgggcagaagacttactgtattcatctaaaatatctttgatatattgactgctaccgaagatgtaattcaaccttggggacttcataactttagttccccctttcccatttggatagagaatttcaagcccttctggaagttcctttacaatctcctcaaacagttctgttatatctaaatctatcataaattgaaagcattaattggggtcaaaagattcttggttattttcacatcgaaaggacaatcattcgacatagcccattcaacaaactgtttattcttctctaccatgctattccatgtgcttacttgtctcttcaaaggagctatatattcattagcacatttcaaacggacaagcccggttattgtagcctgggtgtttgcgtcacgaagaatatgataaaagacatagtcagcgaacggttcacacagcttctcgcataatactgcatatccggactggggggcttccttctcttctgaaatatcaacttcatctgaagaatcttccttttcccgttcaataagctccaaataatctgtgatagcttgggaaagagtcacaccaacaacattccggagaaattcgggctgaaatgccttaatatacccatttatcacctcattcacagcaagagattggggcgaaggcatttcagcgaccgaaacattctcaatatgcctgggacctgacataaaatatgaaacatcaatcaacatagcgatagttatttagaagtcttgcctttcccggttttcttttcatcttctacggaaacggctttatcatctgtaacagttacctccttggcatcttcctcttgcaaatcttttgaatcggcaaccggaagattcttttcatcagaaggcacctgtacttcaagttctgcaatgcgagctttcattgtttcacgctcttctgtcagttcaacaattgtcttatctttctctgcaatggatgcagtaagcctgccaatctcttcatttttttctgcaagcatacattccaatgtctttcgggcatcttcttctgtaacaagaccacattcggaaatagggatgagttgaatcatccctctattaatccgaatgcgttgctctttaagcacattggttacatccttatcgttacctctaagtatgtaatccataatcctacgctttagttattgcagtcttcaatgcggccaaatccccataagcgaaagcccacggcatataaatcgggaagataacttcttcttgtgccatcagcacaacctcattgcaaagcttggtctccacatcttcagcccattcaagtgtcaaagtggtataatcaaccaaatttgcggcttggttaaagtcacctaaaagatacttacctggaagaataccaccatactcgataatcggacgaccggcaatatatttcaccccatcaaccattttaacgataccaagattacgtcctgtcgtatctttttctgattccataccgttaacagtcattggattaagaataatagcattcggaaaatactgggcatatgtcattgcggcgaaagctgttttcactacatcttcagagttgggttcctcaatgttcttaaagccggcttcatgaacactgaatgtcattttatccgtagccgtttcagcaccggagaacgcgacaccaggaataaggatacgaccatcttccattttcacaagagcgtgtgttttgttcagttctgtaagaacagcggcaccagcgaacgtgatactcattccatcaagaatcaaatcctgtggttctgcaaactctacaatcacatccttatcaccgttatatccggtaatagcttttacagcaccggcggcacctgtaacaatggctgtactgataatcttctctacagaagtcaccccagtattattaataataccaagcaaattctcaccattaccgtcaccaaacaagatgttccagtcttctgccatccaaacagcttcaggaagcatgttcaagatgtaggaacgaatgtacactcttgatttcaacatacgttttgagatacggatatgagtaccaaggcgcttagttcctgtctgtatctcttttaccttgatgcttgattcaggcaaacgcccattctctgttacaaaacgggcattgcggttgaaagcatatacttgtgcataggcaagttgagggtatgcaggatcagcagtcaacgtcgttaatacatcacgcatatgcaactttttgttggcaacctgagtcacaacacgtttctgttgttgagtaatcaacaaatcaccggtgtaattgtcagtcatggaaacgacatctttcaaggagaagccgtcaaattctcctgatttgcgtgtttttccttctgcgaaatctctgaatttttcagaatcaagcatctcgttcaacttctcatcgaacttgttgatagtatccatagaaagacctttctgcttcattttctcgatactttcacctagagttttaacttgttctacaagttgctcgttgtcctttaccaattgctggaacttttctccatcataggctttcaatagattattgatgtcaccaaactgtttcgttacctcctccggtgaggcaaatccttcaagtgacttgttaactacttcacacatcatgccgacaatgttttccatgaaagttttctgttctgccggcagaccgtctgttttcagattaaaatctgatactgtaaattttttaggcataaaatttaaattttaagttatttattctcgaaacagctattcaaactcttgaaatcgagtaaagtgccattatcagcggctttaatcgttacttcatcgttcccattttccccgtcattcttttcttgagtgtcaacagacggctcattttttccggtggtattttcagaagtgttttgcagaatagcattcgaacgatatacttttccccaacagtggggacatcttacataattcataaggtcttgtagacccttttgagtaaattctttcttttctgatttgacagaatcaataagagaaattacttgggttctaatctccggagtgagcttctccatttcttcccttacaatgtcctgtgttatccatctctgataatcagcagcataatctaatacctgttgggcaaaggtatgctctgtttctgcatcataatcaaattgataaccacaatgaggacatgagacaacggcaccaccgttgaggctcttcagtaataaacttaattccatatcgtatccttttaaacgttcatcactatatccatgctgcaagaacgctttccggacgaaatcaacagcttcctttacctggtcagcagtagcagacttgatattcacaaggaacgtctgtggattactcccccaacttgtcaatgttgaatattccatcatacgccattcaagcaccttacaaggatcgatagaatcccttttgatggcttttactccgatagagtgttctagggttcttccattctctgcaaacagcttataatcagctaacgtatcacggccaatctgtttttcaagatttaactgaccgaccataaccaaattaccttctgtttccttaccactcaacggaacacctaacaactggtctgtacgatgattcaggaaccaacgcatccgaccaatattttctttcaatgtcttattgaatgagccgggcatagatatgtcattttgtgagtccttcacaccgataccgttcaccgcaacggtaacgatacccttctcatcaacatcatttgcctttgtcttgtactgaaggcttttgattttctcttccatctttttcatctccacttttagtgttaaaaactcgatttactttatccagttcctcatctgacatatcaaatttcaatttgtcaaacaagggattttctatcatactttcgcctatttgggcacgccagtcattgagtgttataagcccacatgagaattgttcacgacaacgtttatttatatttgtctttacgtcttcggattctttcaatccttcctgcaaacaatcaacatcagagaaatcacaatccaaataatatccccctccttcaagaccaaggaaagctgtaaaatccttgcagaattgtttggccataggaataacagttgaacaatatacgctcttttcagcagtagcctgattgctaaatgtggactggtcttttcgcggaacaagaacggcagggatgccgtatgcccctgcaatatttattgcatcagccaaagtctcttcaaacggctgtaactctgcaatagaaagattagtacgaacaaagtcaatgtctgcatctgaaataccataaggtacctggcccttccttacaccatacttctcaaaattttgcttcaaaagctgttccttttcatagtcagtcaacgctattgaaccggtagcatcagttttcttacttacaataaagcccaatccaccccgctttacataaatcacatttctagcttcatatacagctattagatttgacattggcttattttgggaagcaagacgacttttggacttcaagaacatagcccctgaatagaactctgcacttccgtctctatcatgccatatttggtatggaggaatttccaaactaccattccaaccatactccaaacgatagctacgaataatatcttctgtttgggcaatgccaaacaatggcatattcccgtaaacaggttctacaatagtcttatcagaaggtagcacccaataattatcgcaatatctccatttttcagctgtagaaaagacatcaggcatagcggcacgaataaagctattccctgtacacaatttataaatatggtgctgataaatcaattctttccaacgcatcaaacaattaggacgactaagtatgccattcattcgtttattcgcccatactatactgtcatccttagttttcttcaattgaaaattagcacctgcaattcgcgatgcaatataatcgatcgggaaaaagacttcaggtatcgtactgaatagcgttagatagttactgcccgctacaataggactagtaaggtcctcaatgtatgcaactgaccatttttcagccttgccactttgagtatctatatccttattttcagatgaagtaactatttcaacttcacctttagtcttagatttctttccaaatagattatcaaaaaaaatattcattgggttcctttttgagcaaaactaagtaaaaaggaaaaccgttttccaaaacactaaaatcttgaaattacgaaaacataactccaacgatataacacacttattttcaatcacatataacacaattcaattcaaacctaattttacaacgaactgtactagcccactcaaaacagcactagcctcttttgtttcactatctttattatagtccatcaggttattcatgaaggcaacatattccgtatcagattctacttttgatgcagaaaaaagaatactatttttcacataatcagatgttgcagcaatacgcttgtctacatccggaaactctttcattacacgaatctccttgtttgtactagaacggagttcccggataaaagggaaataagcatccgtacattcaattacacatgaatcagattcatgggacaaaatagaagaacgtatatcttctgttgaagtagtttccataaatacgacatcaacaacatgccatttatttccacatctaaacgcttgtataaggacaaatttcccattaacattcggcatcacatatagaatcttcttagtgtatttacattcggtatctggattgaagaaattaatagtgccattacaagcatacaagtttctttttcgccggttactaaactctatatactgctcactacacaaatccacaacgacatatcggaacgtatcagacaggtgcccgtgctcctcataagtctgcaaggtagttttattcttgaccttagttttaagaatggcaccgttagcatctttctgtacgctcatgtagtcctcaatagataccgaacatgattcgtcaatgtatatctctataccgggaacagtacaatcaaagatagcattgataaactcaccagtcattgcgacactcggattcttgttgcctaccttatcttcaatctcgaacccttctttctgcaatgtgtctatgaataagtccatccaggaacgcttctcatcgtcaatgctgtttgccgctttcgttgatgcatcaccatgtacatataacctatcagaatattggatagatttcagatactttgcaacaagtttggaggctttctttactgtattgtttgggctttcagcgcacgtttcatggaattgccaaaccttggtaccagttgtgaaatcgacctgccaatatgatacactgatatacggaagcacgttgttatcgacagagatatgaataggtaagtccggaacatacttatgttcaccggaatgtttgccacgattgaaggaaccgaagaactcactaccggtacgaatgacaccccattctcccaatgcgtacacattgtaatagtccggatcgtgaactctatcatactcaaagtcggcaacacattgctcatcatagaaaccatacgcaccgtcaggactaccgaccacccaaaaattattcaaataggtagattggataataactgtattaggtgcctgttcctcgatttgcttagtacgaagattaagtatttgcctgggtgcattcttctttacggatttgaccttggtaagttctttcggcaactctttgccggcaatggtaaccgtcatcggtacatcatgccatttatctttatcaataaactctttctttatccaatggctttcactaatcgggttgaaggtacaaataatctgctgccctttcttaccacgcaaacgcttacgtagctgcttgaaatccggatgctcgaactctgaccattcctctaactgaactcgcttatagttagagataccttttatcttctccggatcgtcaagaccggagaaatctatcttcgcaacattaaccaaacatttaatagtattctgttggaacttgaacaaatgggatatgccaagaccggccgcagcgactttataatcttcataaatggttttgagaatagaagctcctaccttacgcatgacaagagtgttctcaccatcctgtaatgtctgtatcagtattgtttgtgccacactatacgacttaccggaagatgaacctccatagagaatgataaaacggatagtctcatcattcaagtacttcaatagatagaatccgttaggatttagcttcttataatttataaccatattgttctaaaagtaaggtttctccgtaggatgaataccggattttgcagttcaaattgttctattcttccgaattctcattatcttcaaatccgatacgaagttcaccgactttatttccgtctccacctttgatgttgacattcttatcggcttcccatccattccaggcaccaagaatccgggcggcttctgtcttgccgttgaactcataattaaccactcctctattattctgaatcttcttcaacgcattacgggcacgctttggaagttgggacggacttctcatctttgttttcccggtaacagggtctacataatgtaaatcatcgggatcagcgagtacaatatccattaataccttttcgaccgttttcctctctacttcagtctctttcgccctctgttgcttaatctcacttatccttgcactaaccttgctattggctaacaatctgctagcagcactccaaatcgtttcaggtttcatctttgacgcatcataagacatcctatatgcttcactagcattaccttctgtatcaacgtagtatttacagaatttctcttgcttgaatgttaatggtttctcttgctttcccatatcaattgttatttattcctacgagaaaaagaagctgctctctatcctttaaaagctcataggtggcaagcagtgtgctgccagttgttaatatgtcatcatacactattattttcttttcctttatcggacgaagaagaaagaattccggattcaatctatctttagttaggcactggattgcattctcatagaatggtattttcaccgccccagctatttttgtgcagatagaggttgaaaaatgaaagccctcgttgtgtctccgtcgcggtgtggtgactatacaccatccttcatatccccctactatgaagcggtggagaaactcacacgctctctctgcaaagaatgatgcaagttcctccgactgtttaatttctgaaaagctggtaccagtcttggaacgagtgaactgggagatgtaatagatatcaccctttttatgaagtgacaccttttctctcaaatcacataaccgttcctgatgagaccagctcttacatttcaccgcttccggcttatcccagtcatcaatacgacatatctttccctttcttttcatcaaaaatcttctttactccatcctcgacagatgtataagacaaaggtactaaatagatatcccggttcaccgactgctctaaattgtcaaaatcccgtttttcattaattagctcaatttcaagcggtttgtagtattttactaaagaagcaaaatacatagtagtcacaggttggacgttacaaatattgataagctgccggttacagcccaccgcataaataagcccttcgacgacatcatctatgtaagtgaagcaccggatattctgaccacaattgtataaagacacgttttccttttctatcaggaaccagagaagagttctttttcgcggattaggtccatatacattatgcagccggcacccggtcgcagccttacaatagatagatgcatactgttcatcgaaatacttgcttattccatacatggaagtggtattctccggattcgccgttgacgaactagcgtatactaacttcacatgatactggttacatgcatcagctactcgcatgaaagtatcaatgttatccttcctgatctgttccaggtttccattaaacacactagtttgcgccgccaaatggaacacacaatcaatacccccatttttcaggagctcacatacttttgtggcttcagtaccagactttcgatcaagtcctatgacttcaacacctctttttgtcaattcgcggcaaagggcttttcctataaacccctcactgccggttacaatcattcttctcatcatcacaaaaaaataaaggatatatcaaactctcgtatatccaaattcaacatattgttagtaaaaaactcaaaaaaacattaacttcaaaatagaatacactacatttgtagctgtataaaatataaaatcaaataaaatgaaaagaccgcaaatagatataatcaaatacgcattaattgcaacagccatatttactctaatattaatattagtatatgtatatagatttcatcacggactgtcctataatcataatgattttgctgatttcggcagttatttaggttcaattacaggattacttgctttcattggagtactttatacaataaaagactcacaaataaatagacaaattgataatgaaaggtcaacattttataatttgttgggattatatcagcatcaagtcgacaccaacaaatatactgaacaccaaattgagaaaacaggaattgaagcattcaaagcatacgcacatgaagcgcgttcattattctatgcttatgtaatatatcattttataaaagatggagaaaaatttccatcagaattaacacaagtcagtaagttagacgagcaagcatttctggagatttatactaagtttggagttcattcaactacagaattaaatgtattattaaaaagtagggatcccaaatattattacgatactatatacgaaataaaaggcataataatgtcaagcaaaattcatgaaatgtatcgtataattgttgcatcaatctgtaataggatttgtatagaaaaaagataccaacagctctataagttcataagaaatgtcggagattatttatatgggcaatatggacaatatttagggcaataccatagaaacatatattatctgttggattcaatccaaaattttaaataccccaatgactattctaaaatatttagagcacaattatcctcagatgagttaacagtcatactattcaattcaatgagctcgcaatcaactctcaaaacaatttctttattaaagaaatttgatatattcaataacattattgccctcgaacttcctatatctggatatgatacagaaaaagaaatcgtaattcagactattaactctctttttcatgaatttatagctgattctacaaacaaatgattatatacccaattattatatttattgtaactgtacaagaatatagggaaaagagtggttgtattattcaacagtttcctctatacttccgcattcagaacgttcaatttctacttatttgataccaagataatcccaaaaagaaagtctaccttttacattctcaataggactttcaaaaagtattggattagctaatacccagttataaacttctttttcagcccagatggaagaatgattctgtacacaatccactatctcaatgctaccgataatggagcctgtacaaaaactaaaatctttccactctttgttttccggtaatgccaataactgctcattggtaagtattgaatcatagaaattatcgtaattcaaaggtttaccgcttgcatgaatcagtaccctctgccctaaatatttcttaggacacggccaagtacggttctcaatgtctttaataccgtggactatcaaagaggcccacggttgttttattgttattgctttcatttctattctttattcctccaatagttttagcagtgattttttatactcgtctatttccttaatagcatcttcttgacctgattttgcatcatttatcattaaatctgctactccctccattatttcatccttatgcctattcagatatttgataaagtattcctgcatcaaatcagtatccatatttgctatatccgaatatgtgtctccacttccataactgtcagaaaaagaagaataacaaagattacttatattcatactctgaatactctcccttctgccaaatccatctgtatgcttatctattccactattgctatggctttgaaactcttctctgattttagggagagtttctttaataaactttttcagttttctgccagtagtgattaacttacttaattcttttgctgtcatcatcagtctcctttctttttaatccgttctagtacatctctgttggcttccagtatttcatcgaaagagggaattggcatccagtgggtgactcccaaaagcccaacaagatgttctacttctgtattgattacaactaagaatcttctatcggaagtaactacgacaacctcatataaagattgtccatcgttggtgtcaggtaattgctcttttacacttatccaaggagattgctttttctgccactcaacgccagacgcaaatactttacgcatatatgtttcaatcacatgcggctgattgatgcgatttgctaattgagctaccaatgatttaaaattcatatctatcttgttttacgttaattcttcatctatctgttggataatttgccttaatgttgtacaatgatagtcggcacaccctgtttcttcattaacagcttcccaccatacgcacttatcgggatggtgatagccataaaagcgtatgtcataccctttgtacttatagtgcccggtacttacttttacaggtttatcttttttactcatatctatcttgttacgaattaagtttctcaataaatccatccagcaattcacaatgtcctccaacccagcgaacgcacaatttacactcgcatggctctgtatctttcggacgctggcaattctctttgaaagcctcgatagctttctgtttcatgtcttttctaccttcttcacgagcacctgactctgacaagcaaatgagttcgtcaagggttgaataatcccaattatcaccatccagtattctattatacaactggtcaaatctttcttcgtccatatttattcctttatatcttgatttgagcctaattaggctacatcgttaatactaatttctcctttcaaaactcgttctacctgcctgtcgattatctcttgaaactctatctgacagataagcgagcaatccggtataatctcttctactgggtcacctcgccatgttaggagttcgtcaaggaagattcgtccgtctttatcttttagacaagttgcacctacatcacgttcaatctgcgccacctcgttaaatacatccgggaagtcctttcgtatcttattccagtagcccattccgcctttcacgcaaccgatacaattgttgttattatagcccatcttgtacatagcggggatttcaataccggctttccaaagcattcccattgcatcctgcttcgtaatctgcttttcaataagcgggaatagtggctttgtgtccgggtactgctgttttaatcggatagcccggttaatctctttcgggtcataatcgaaaccccaaacttgaccgtcccagtgctgcaattctttttccaacttgtagcggactttctttttcagttcaagagtacaggcggcaccatgcgcgccgttgatatacccctttcgcaacacatcagacacacaggtgtacttgtcgcttcggataatgtggatagattgattgtaccacttttcacaatctgccaagaatctagtgttatcgggatgaccggaaccagtttcaatatagtagatatgcacatcatcgtataggcttaatgctatcttacaagcaactgcggatgtagcaccgcaactgaaccatgctattatcatttgattcctttctaattttattttaattatttttttgcaatatcattccaaaaagcaacgccttcaggagtattattaaaagggaatgaaatagttagaaaccaatgaaaacagcaatcaacatctaacaaattgttcatccgctcttcatttgtcattgagaagtcaggacactcaatattaaatgtctcatttgctctttctgtattatatttccattgattgaaaatacctagtctttctaattttgctattttttcattcctcttcatattgattgacttttagttctttacatctataaaggtaatcattattgacaagttttacaaacagaacattcgccaatttaacgccattttatgctgcaactgaccctagttcacgtaactttttactaatacattcacagagaacacgtgccatgttaacttcgactgcattccctatgaatttcttttggtcagcctgtgtaccaattaacacatagttttctggaaatcccatgatacgctttagttcaggtatgcgtagcattcgcattttaatatcaattatcccgtataagcccatgaactcttttattttttttgtcatagggctgtcggtatcataaatctcgattactacatgtccagtttcagttgcgatcaaataaggcggcattttatccatacgtgctatgagagtgaagcatggattatcaacggaaccacctgcactattaaattgagggttcattaggtagtgccactttctatttgcagtgactgtttgtgcgggctcttctatgctactaccaacgttggagaagtttgtattcataatccacggcttgcagctaacaagattgtacttaggattggcggtaatacatccaagcggcttttctgtagatgaaggtttgctgtttccatattgctggtctatgaaatatggagaaacgagagataaccgatccttcgttgttacggttgcagacggttcatttattgagcggttaaatccgttaccgtaatgggctgatacaaacgcatgatggtctttgcatgtaattgttccggctggttcattaatagaaacattcttgctttcggggtgtccactgaactgttttgaaagaaagcatacctgcgcaactcccagtctgttttgcgtagctactaccgggcatggttcgtcaatcccaggggcattatattttccagtccggctcatggaattatatttgataagaaaagcatctttgcccccggctacaaattttatcaggccggcatagatacgttccattgtcttttcagcaagtggcttctcacgaaaaatacttgttccttcatcggaaaaatccagtatctctttaaccgggcgccacttttccaaacgaccaaacatatcttgtttaccgtttttacagtgagtgggttgtggaaatactatcggtaatccatttttggcaaatataccaaagaagcgttttcgagtagtatatgcaccatagtcggcagcattgagaatacggaaatcaaagttgtagccatactttcttacgttgcgtacccatctttgatatagtctacctttatccatgctgataggctttccgttttcgtccatatcaccccaactcataaattcttcaacgttttcaatctgaatgtaatccgggcaaatagcttcaatgtaccggaaaagatgttcagcaagtgtgcgactatcagcgtcccgaggttgcccaccttttgctttggagaagttcgtacattccaggctcgcccaaagaacgaccgctgcacccggatattgagccttacatttggcaagatgttcaattagcggggaaagttccagcgtacgaatatcttccgtaaaatgcaatgcatccggatgattggccgcatggcttgcaatggcgttggcatcgtgattgacgcaggctattactttagcacactgtttaccatcaattcttgcagattccactcctgtcgaggttccacctgctccacaaaacaggtcaatatataataaatttatactactcatttcttttcttcaaatttctttgattattgatttcagacatacacatgcggcaccaagaagtcaataaatgatattccttaccttttctcactactatacgattgtagaaccggttcaagtagaagtaatttccgcagtgtgtacattttttcatctcacgtcctgaagcatctataatacgattgcgaggtttgcgatgaataagagtacagtttttacactcaccatcagttccacgatgccgccggcaatgtgataaggattttgccccacatttagcaaacaccctacaatctctacgaggtattgattgatacacattcatggcttcctcgcattcaagaatttatttactacacgagaaagtacatcctcattctctggcatcagccattctttcgcaacgttccaagcaatactcatagttggattgaagttatccttcctgacagtgtggtgagacaaacgcccttcagtgggtttcaaatccttatcatgtaagatacacagtccattttcgaagaaagcacaaaactctttgccggaaacaggttgaatcatcggaatagcaatattaataacccctaagaatataccagcagcccagtttgtcagtgctaacctgtcggcataaccagcatctataattcgttcaatatcatcaggagtacctaaacatggcgtatgacattgttgtttacaaacactgcatgagcattgtacaggtacacgacctgaagccctcattaccctttgtaatgaggtttcttttgataattctctcatagtaaattatttgagatactacagattattaaacatcgccccacagctttactgcaaggtcataattttttttagcctcttttactgctttattggcataagccatagcgtatgtatgctcgcgtcggtacttaccggacttcaatccttcgtgatattcttttgcttgttccaacttatgttcatagaaatctatactttccggcatggacaagtttatcgtattagcccttttttcccaatacttcgcaactctttcatgttcggcagccttatcgctaaactcaacgcttttccccatgttattccaggcatcatctatcattttgcgatgtcctcgttcgctatggtgtccaactttgataggctcacccaaagaaaggaaatcgcgatgtttatttgatttctgaaaatactcattacttttttgtactgccgatgacgcccattcatgcctgcgttccgctctttgcttagcccattcttgaacattaaagccgtcagctctaacaatggagtaatagtaaaacccatctttctcgaagattaggttaaatactatactttcgttctccttaccatacttggtggtaacctcaatagtttcacctttttcgtgcttctcatcacactttgccaaaaatacatttggcgcaaatttgtaatacgtgttcattgttttaattaaattggtttgacttatatgaaaaatgagaaaccacagctacttagccgtggtttcatcattaaataactttggttgactgggttgaaccaaatcatcgaataaaccaggaacacgaggttgtaacgccttgtattcttcctgaaagaattcttctttggttctcccatgttttttaccctttcgtgtatgtacatcgaaagtgtaatctggaataggaataggataacgcctgacatcatttatccacttttctatatcaatatcctttctatcatagatgaagttttgcaaatgatccgcatcacgattctttctacattcacaaaggagaataacagctttactgacaaatatcctccctttgggttcagtagcagtcttgtttaccagctcatgcccctgccacaatgcttctatctctttagtaatgattccatagcaatcttcagcactaatggtaaacagacgcttccacacatagtcgcggtacccactcgcccaaagttccaatgcaaaaaagccggctaccccggtgtcggctcgcctaatggctttctgcattgcagaactcacctcaaagaaatcatatccgcaaactgttcttataatcataattctaatttaatggtttgacttttagtttattacatcagtaaaattagctaaaaaaggcgaatatgacaaacagaatggacgccatttaaacgccttttttacagactattagaatttgaatttgcatgatatattatattgaacgagctgctttgttttgtctttcccattagtggttgcactctttagcaaaatactatcaccaaaattctttttgataaagaggatagatttacgttcctcttcctgattccttatagaagcaagcccaccagcgtttacaaaagtgttcttttgctcaaaattataccgcaaatcggttaaaaccttacgttctttgtacttcatgtaacaagaaatccaaaaatcttccttcaaacgtatttcctcattccaccaagtgtttttgttatagattactccataactgcaaccggttatcattttcgaaagagaaagaaaagcggattcatcatacattaccggcgatatccgagcggtgaagccaaacagatgtacatccatcatactggccatctcaaataatgactgaatgatattggttatcttatctttatcctttatccggctaggttctcctttttccacataaataggtttgcaggcatggacatcatcatcaagcatgaaaagttctccaaaatgctttgccatccagttacgtttcgggatgaggcccataacgtcgtcaggatgagtaacaatttcacattccgggttaaattgttgatataagtcagcttgactttcagcaacgcaaatgataggatcgttcaccaactttttagcgaacacccggtcatggcgcttatgacttggtattactattttgcaaggcatggcgaacgtcttttatgtcgattacattactcttacttactttcccggtcttgtacgacttcatgtgctgcatatccagcctttcacgaagccaattactatctacctcattacttgaggtgatgataaacaactcatgtttttcgtcatactttggaatgagaggataaatggctgtatcatccgtgatggcatcgaagcgctctttaaattcatcctctttcttctccggggcaaattcgatgccccaatcttggagttccgccttattccactcgttttccataacgtccaaatcattctcaccaaaattgacattatctttagtggcatattccctcaacttcttaacgggggtatcaggtgccagaattttacaaggcagttctttataacctaactccttgcaagctcgcaaacgtaaattaccacaaacaacaatatatctgccatcattgtagggaaaaactataagttctcgaagttcaagcatctctggcgaatcctgaatgcttttcttcatcgcttcaaagcggtaatcacgaaaaaaacgtggatttttcggcaatcccgtgagctgccccttattaaaatcaagtaggcagacttgaataatctctgtcataactaactatattaaaatcaacaacacaaaatcaacaacacaaacagtcagtaacaacacctaatcattttttctatcatcgaactctatcttatctttgataagctgttcaatgtcctcacaaccaaatctttttaaataggcaacaaggtaaattatcatctcggctgccaattcttcatcttccgaatatttaggaagattatcactcctatatttagaagcaatatcgaattttctccaaacggcttcaattcttatgctaaacgcttttcttgagctatgctcattcatcttaaagcgcttcctcatgatattcaagcatctctgggcaaacctattcaatgttatcatatcgatcgggttaaattgttagactaagaataatctcacactatttaataaaggcggtggtctgtttttatacaaatacatatccattcttatttagattaaatagcttccatcaaatcaaatagcgtcggtgcattcacttcaatttcagcttcatgcaagtatgaaaggctgtctttccaatagtcataattcaactcggtagagagccctttacgccccaatctaatagcacagtaaggaacagtaccgataccgccaaatgggtcgaataccaagtctcctttatttgaataccgttcaatcaacctctcaacaatatcaagctgaagaggacaaatatgattttgacgttttttctgtgactgcttggtattgagtgtacgcatccgggtaacgtcatcccaaatccaaggtttcttacttacaggatctacggccataaatgtttttggtagtttaccgtaaacttctaattcttcagcgaaagcaacatgttcttcataattgtatatatgttcacgctcatagtttctaaacaaatggcgtatcttgtcaataccggcaactttcatatcttcatagcttaacaaagtattacctgaagatttccaacttgcatgagcatctatttgccagcgggctaacgaatattcattcttattcttggttactggcaaatctgcataggcacgtgaagtatcagaaggcagtttacggaaaagaagcacatattcagggcaaccaatacccatcttagaaccatctttgcacatctctgtatagccaaggcggtaggtctggttattctcccttaccacatcggtatctactgtgatacgccccatgtagcggaatccgtgtttcatgtagtgaaataccgtcatttcggagaacgggtcgatggtgggcataccgtcacctgtggcattaccgaacaatacacggtctttcacatggatgcaagccagccgcccaggcttcaatatccgcatcagttctggtgtgaggtagtccatctgctcgaagaacttgtcgttgctttcattatgcccgaaatcgttataggtcggcgtatattcgtaatgattggaaaaagggatgctggttacaaccaaatccaccgagttgctttccattttctgacactccaaaacattgtcgttattgatggctttccacagtttaccggatttttcttcacggctggcaaacatccagcgcatcatcttctcctctgcctgcaaaccgaacagaccgttctcacggacgatatcagtcattttagaaaccatttcacgatgctgcgcccatttctgcataaagcttttgaatatctctccttcactttctgcatagaccaagtaaaggtctacaggatgtttttgcatgaaacggtagatacgggctatcgcctgaaacttgtcattgaaccggtagtcgatgaacatgatagccttatgacaatggtactggaagttcaaaccctcaccaagcatttcaggctttgcggccaggtatttcaatctcccgtttttgaagtccgctatcaccttgtcggcttcctcatcatcctgcgagccataaacagctttgcaaccggggatagccttgcaaagggcttcccgctcactctcaaggtcatgccacaaaaggaaatgctcgtccttgttttcaggacgattaataatctctacgacacgggcaatcttctctgccatattgtcccgacgttctttcgctgcatcagcaagtccgagagcagcctcacgaaacatcttcacttgtccgtcacggtctgtaccggcagtggaattgtcaacgctaaccacttcttcatgtacccgcagttccggcaattcatagccggtatcaggataaccgaggtcggaaggcttggttaggaacaatgcccaagttgatacccacagccaaaattctttttctttgtgtggataaagcgttagattattagctttggtactatcacgttgaaaaaaacgtgtaagggcttgacctgtatccatcactccaagatatccggcataatgtatcagctccttgtatctgttaggtgacggcgtggcagtggcaacaaagcggaaaggcacatcggcgaacagcggtaggaactcttggtatgtcttggtgccgaaccctctcaatacgcttgcttcatccaatgaggtaacggtaaaaaaggaaggttctattcttacgccgtcttctccgtcacggacacgctcatagttggtaatcattatatcacacttgcaggctctgacttcgctcatggtcttgacatacttaactgtcatgttcatgtgctccttagcttgggtgataaactctactactacacgtttaggacaaacgataagagctttaccaaaatactggttgattataactctgcatatctccaattgggttactgttttctgcataccgaaactggagaatatggcacggcaaccaccggataccgcccaacgaacggtatctctcacatgagggtaaagagaagttgatatttcattaggattaacttcaaatccagtattatggctaatagccatcttgtcttttagaaattctatatagtctttcattttcatttcaaataaagagaggaaaccgttaggcttcctctgtgttatcgttattaagttcttcgagttgctgtttgagcttcatctctttcttgctatatgaatctgcaagtttctttgttagcgcattgtaatcatccggatattgttctgcaaaaaggattttctgacacttttgcaaataggagcagaaattcacattattcgatgataagcattcagcaataaaggctctataccattggtgtcggtcagcttggttgttcttgacataatttacaaaatcactctcaccattccattttttcaaattcagtttttcaagataagtactgctacaaccgctaagaaccagcacatcaaaaacaagttgttcattttcagagaattcttttgttctctgataatatgttttctcttgcgcccacttgcgcatttcttcagcagacttctccttgactatatccttcgctctttttaattgggcgtttattttttccctttctatctcttttagatcggcaacggcggaagtagaggaagccgttgcttttctaacataatagaaactaacgttaaattcgggagaataatgtccaaaaaatgaaagacaacgataaacttctccatcttcaagcattttcaaagtgcgttcatcatcttctgaataccagcacttacatctaaagatttcatcaggatcaactatttcaaatccaagttgtttaacagcttccaaagttttttcatagaaaacctttctatcttctccccaatatgtatcgggacgtctagcgataattactgtttttccaaatgaaagaggttcgccaactttaacaagatgttcatattctagttgaattttccgcgtcacataagcaatctgttttttctcatagcaagcagcattgatacatctagcatccttactattcatttcatagaacaaacaaccatgattacacgtattattctcacattgagaacatgatttaatatcggtattttcccaattatcggaatcatctttaatccaaggtgcgttaccaagctccatgaaagaattactcacaaattctcgaatcatagcagtagtacattgttcttcctcctcctcatgaaactctttttgagtatcttcatccaatttagaaagaatcatagcaccggacaatggtatatctccatttcttacccgctcttttagttcaggaataagagaattcaatttaatacggtcaaaaacaaaccgggtagactttcctattttaagagcgatatcttccaaagttcgtcctttttcagccaactgcgcaaaggcaaaagcttcttcgatgggatcaacatcttttctttgaagattctcggtaatcatcgcttcaaaagcctcatcatctgtcatttctctggcaatgcaggatattgtctgaaatttttccgacttttttcgatgggctttgatttttgcaacattcgcttcatcttcctttgctttcaaaagtgacacagcccggaaacgacgctcaccgcaaacaatttcgtatgtgtaaggtaatggggtaacatctccggtttctaggttagtcatctcctcggatttagcaactctgacagtgataggttgcaataaaccttgcttttcaatgttgcttgcaagctcttcaagagctgcttcatcaaaagtctttctcggattcaaaggagaaggactgataaggtcaattctaatgttttgtacttccataatttaattatattggtttgacttctaattcattacatcagtaaatttatcgtaaaatgacaagttatgcaaacagaaacttcgccattttaacgccattttcatgtgggcttattacgtatttgaataaatcctcttctttcagtttcccgaagaagttccatatcttcttctcgtatttcagcaggcgtttcaccgttcacacttcgatacgttccaataccgaaacgctctctgatacgagcaattttatccgaatctttagtaacccagtaaattgtaactttcatagtagctatattctacgactctcgccacacagggggagaacattaaacgttttaaaacgatccactaatcttggcccaaaacgtttcttaaattcggctatgccaagattcgatgttatatgatacttcttgccatattgctgaaaaatctcataccgggcataaagaaattcatcaataactgaatcgagactggtaccatacgatttttgattttccgtttccagaccgatatcattcaagcagatattaaagggatttggtttaaatcctttggattgattctcattgtaagtgtacaagtcaatatgcccgtgaattttataataattcatcatttgagtaacagacaagttttcaaaagcattggggttacaagtgagtttcaaataatctgcaaaaatctgcatcaacattgtttttccggtaccaggttcaccaacaagcaaaagattcttatgaaccttgtaattctcttccggaaacacattttgagcataccgacatccgttgaagtagtacagaagaaactgaattagtttagagttgttatcatcaacatcaaattttctaaactcccgttccgtataatccgtaccaaggttagaaattaaattccaatgactgtaatactcttgcgtatcagttaagtcatattcagaaacgttctgaatactttctttgtgcctttgtatcagattctctatctgttggagcgtcagcttgcgcttgccggcttccttctccatcaaattttgaagtttgcttgataaattcttttcctcttccgtcatggtctaattcattttttcgattttcacgaatacgatccagtatccaaaggtttgctttggaatcccaccgctctattttcactccattggcattcttccaccctatcgagtcaaagtgattgaagaatatttctgcttgctcttgccagtcatctaaccgttccggagcattttgcttgatgaagtgttgaataacctcatcaagcgtaggagctataaattcttttgcgactcttttaggtttctccggtttagagagtgggaaaagctcgccagagctactttctttcttaccccctttagggggttctttctttgtctctgtcttatattcttctttagggggtatgggggagctttcttgaaaaggtgtccctaaagggtaccctaaaggtgtccctaaaggatgccgtaaaggtggtatattttgcatacctttttgtacaccttttatagaatacgttgatttattgcctcttccattgccttgtttacattcaataagacctgcttgaactaatctatttcgggcggacttgaatacttttacagacactcccacgtcagatgacacctttgtatcactacgtgtccagttatcctcccagcctaaacgattcgcaatttttagcaagtaaaaataaagcctcgtttcacagcaggaaaattgccagctttcgtcaagttcccaaaacctattgataagttcaatataagtcatatcaatttataataattccgtaagacattgtttatataaggttgagggtcagctttcagataatagcaaacgctattaatgaactcaatcaacccatgacaaacgacatatacactgccatatttctcaactaatgcctgccattctttttgctcatcagactgcgttccggcacgtttaccttttacatgtggagttttcatctctatgcaaagactgctcttaccaccgcgaggaaaaagcagaatcaagtcagcaacaccagcgatggcaccttcatatttacgcatagcaccgcttttctttgtcctgacgccgccgtttggtatagcaaagagtagagggccgacattgggaaacgtttctctgaaccaagttacacaaatgtgttgtatcttggtttcagaatatttcacctccaatttacgaatatcttcttcagtcatttttctgcttgttttttgaaatcgtagcacattcatttagaaggtcaacgatttgtttacacctgttcctgcaaccgacaaaggatattatggtttcccattcaggaccgaacaacatttctttcttgtattcctgaatatgagttctctgcccaattataactaatctaaatggcttcataatttatccctaaacaagtccattgcaagattcaccatattctcttctacttggtcatccgttccggttacaccgttagcaatgttcttctttgtttgaatcacatcatacatatacttgtcaatagtatccttacctaagaagtaatagcagttaacgttgttcttttgaccgttacggtgtgctctatcttctgcctgttcgcaatcactgaaagtccaagggaactctataaaagcaacacgactggcagcagtcaaagtaagcccggtaccgcccgatttgaaattcagaataatcagtttacaatccggattattttggaaagagtcaacggcatattgcttttggttgacactatcggaacccgttacagtaacagctttaggaaattcctttttcagttctgctacaacttctttcaagtaaccgaaaagtatcagcttctcaccaccgtcgataacatcatggacaaattcacaaacagccttgattttacctctggcagatatctgctttaaaagctgcatctgcaccataacggcaccattcattgatttctgcacttgttcatccgaagcgttcttgtacttcttcaagtattttaccatatcagcctcggcagccttatactctttggtggtagtgatatcaactgtcaagtattgacgagtcttgtccggaagttgtgtaagcacctttgacttctcacgacgaaagaagcaagtattccatagtcgccaattcagctctttaacgttggatgcctgtttgggaccatcacaatatctttcaacataccggctataacctccaaagtcctctaatcgacctaatatttttagctgttgtagcaagtctgtattattgttaacaacaggagtaccggtcaatgcgaatatataacgtttacctttgcagataccttcaacatatttgctctgttgagttttacttgatttgcatttatgagattcgtcaatgataacagacctaaacagagagacacgctgatcgaaagcaatacttttcattgtaagcttggattccttatttacagcttttacaaaaaatttattaagcgattcataattagtaatgaacacctcacaaagtgggttgccatcagactttttacactcataaaatgattgccaggactgtcggtttctgtcatcaaggataatcgaattcatacctgcgaacttcttaaactcacgctgccagtttactttcaacgcagcagggcaaattacaagtactggaaaagactcaccataaatgggcgcttccttatgtgctttaacaactgcacatatggcttgcaatgttttacctaatccgggctggtcaccgaaaaaacagcgtttgtgctctattgcatactgtactccttcaagttgatactcgtaaggttgaagtaacatatagtgttcaccgacaaaaggtttcatcggaggaatatcataattaatatcttcagttacctcacgttccttgacagtagaacaataacgcatctgaacagcccattgcgcaaaagctctcacataccaattcgcatcacgtccaataggataacgcgtatcattgatactaacaagccacgcccggtctgttccgtcatagcgtggcttacttggtatcatctttatgacctcgaccaactttgggtgatactcgaactgaatccggtacagattgggcgtcttagtcacataaattggtttcatgaagcaggttctaatactaattcatgatgttcaactgttgaacatatcccgttatcttcaccatcttcattcattgcatcagcagcttcatcaaccttgtcaaacggatcctcaccatctttaaattcaaattccctttgaatctccgaacatttattctctgtaacataaagctctgcttcatacaagaaattataaaccgcatcacgaaactcctcacaatgcacatacgattcattgtccggatcgaaaccgataccaggagaacaaagattaaggactttgctcgtcataagggttcgcttacctgtcaacacacaaacctcaaaagaagaatcaccaccaatgctaacgccggttacattgaactttttgaagaactcatcttcaagacatgactctggacgttcccaattaatgtactgggattctttctgttctgtaatatcgacaatgtagggtatgagcttgtttagcgaatccttcaaatccggatgaacaggattaatccccttgaaaacaatatcgtttccttccttgtctgcatagaccacttcaagacatccctttttggtcaattttgcttttgaaatattcaaatccattttaattaaactttgagttaatacttacctatgcaggtattcattaataaaatctttatagtactggtcaacaggcaatggcaaattgattcctaattcggtggcagcatcagcctgaaccttatccatgaaagttttcatttggatcgtattcaatttagaagtacttccaacaaccgaaacaatatttccattcatacatatttgccgtggaagaaacttccggcaatagtaatcatgtacatccaacttatccgtgcctgtctccctctcaatacaggcaaaccacagccacatgagcgcgttctgcgacagggtacgtggttctacctttctcttgatgcttacagtgtaagttccattcttgagcgtggaacagaggtagtcaaacgacttatccattgtgactaccccattttgttttgttagaatagcttctgccatatttagaatggtaaatcatcaggcggtgatacctgttgatatggctgttgctgatatgcaggctgctgtacttgttgttgctgtctctgtgtaggctgttgcgttggtaacggtggtggtacaggagcagcctgttgttgaactttcggtgtaagcatctcgatactatcaacaaagacttcagttatgtaacgtttaactcctttgctatcgtcatagttacgagtgcgtaacttaccttctatatacaacttatctcctttatggacgtacttctcaactatttcagcagtcttattccaaaaaataagattatgccattctgtacgttccggcacctgggttccattttgtaaggtgtacgccttatctgttgtagcaaaagataaagaagctactttcgctccaccgtccaatgttctcacatccgggtctttaccggcacgccctataagaattactttattaacactcattttccttcctcccttatagttacacgaatactatccgctttagttgatgtttttaaatattgagaatatagttccgggtgatcttcctgaaacttctttgcatcaaaactcttacccgttgaagagggagtatagctaacacgcaaccgaccggcgtcccatgatttaacaccgttctcacgcatggcacttttaagctgttccttataacctttctgcacttcagcgatataactcgcctgttcctctatatcaataatagtatttactaattgcataggaataagctgcttctcatcggctggaacaggagcattaggtaagaactgttcacctttaatctcacactccagtaatctcttaacctctgcatccggcttacgctcaatctcgactaattccgacttatttccacgtaaccaaatgccaaacagtttatcaactttaattagtggattttgaagttcaaacaaataggcatagattgatagctgccaactcaaatactcacggtcaaggcttgcagtagttttgatgtcaccaagacagattctaccggctttctcccaaacacaatctatattcgatgcaaagtattcgttatcagagacggtgtactcattagcaaaagccttatatccagcttttgttcgctctttcaaataattctctgcttcaatactttcaggcggtaagcctgttgcatcaacaaactggcattgagcatgaataaggctccccttctcagcagctctcttcaacacaaaatctgggacatctttatatttgtcagggaacaactgccggctaatcataccggttataccttgcaactgtttttcaccaagcatataagtgtggttttcctcattgaaaaccacactggatttcactaattctatcattattatcaatttttaggaggatatgttttctgcatgtcaatagttatgtttctgaactccttattattatgaagttcaggatgttcagcccaaactctctcaagctcttcgcggcttttaacaccggtcatttgtttaatagcacgatccaggtctacaccagtatatactttgcccgaagcgtttgaagcagaaacattgggagcatatactttttcctttgtattaccataagcaaaacgaacacggtttttattgtccacaataacaagtagaataatctccttttgctcgttataaccaatctcttttacactgaatttggtgtatagagcaggagaacctgttttgctctgatatacttcatttttctcaagtggaatccaaatgaaaggacccgtataaagttcacgcccaattccccagttaaatcctgcacgtttaaaggcatccgaagcctgccctttctctttttctgtactggattctgtcccaacatcctgtttactcacccattccttcttttcattatcccaaatggacaacgtacagaatagattcccattaacgacatcatggtgccgtttccagttcatttctccgaacacttcatcaagtattctcatgtctactcgagcatccttgtataatagcaaggagcagcccgaaccgtccggtttcatagtaccaactctacattcaatttcagaagctagaagcggtctgatagagtttttcttcttctcttcattctgaaccgttgatacagtgttttttctcgctgtcataattctaatttaatggtttgacttttagtttattacatcagtaaaggtaatcgttatttacaagttatgcaaacagaaacttcgccattttaacgccattttcaggtagttaaaaactgcctgtacagtattgtacaggcagaaaaataagaaaatgaataatccaatgtaccttatggaacggctacgcttgaagggtgtacggctccctgatttatacataatgtaaatgctagtggacggaaccggagtcgaaccggtctcacggaatattggtgcacctcaccgcagtttcaaccaacgatatacatatccgcccgattaattaaaaaggtgcactatcttcacagaccgtacaccccaatcacaaacacaaaacaaaactcatgaactactataatttaataggatcaaaagggtgaatggcgtggggctcgaacccacatcacgcatatctgcgtatgctgccaattacaccagccatccgtttcaagtgaactattctcacgaaccattcacctagaacacaaacacaaaataaaacacgacattaactattaattaaatagcactctcacgagcttcttgcttccggatagccgttcaaagcacaccggaatagtatagaacaattaaaactcaaataacaggggctttaaccctacagcgtccttttcgctggcaacattagttaaacataaaaagaaaaattctctgtgaaggaacccggactcgaaccgggatgatagattacctatgtatgactttcttcaatctatctgcatacttgcgtttaccaattccgccattccttcaggtcgtagccagacgcttccggctacattgattgtatatataatgcaaatatattttcaccctcacgggttacttaactctgattgagttgagccgggaaacggattcgaaccgctgacctcatgtggaaacatgcgctctaaccaactgggctatcccggcagatgcccggagaaccgggctaattggcaaatactaaaattaagcaatgttgaccttcacaggctatttttattttgtttcttatcttcatagataaatctagtaaccaatagtacaacgactacgaagaatatgatatatgaccaagcgatatcacttcttgtagcttcgattcccccacctatatacatagctaccaataaggcaaccactgtaaaaatgttatgaacgattttcaatgttttcatttcttccgttttttacgtttgactttcttagcgcatcggcaatgaagtaatacctgagcagcattacagtgccatttaccattttgagcatttacaggcttatcactttcaatcttacccgcttctataagattcatcaatttcttttccccacctacataatatgcagacttatcttttccgaatgtctctgtagaaaacagacggagaatattatctagcaatatttcagccatttcacctctaatcatctcaacaaacaaggtagttacgcaattctagttactataaactgcatattttttacgtctgactttgttttccaaaccattccttcagctttttctttataaagccgagcatttaaagtgtaagtaacagacgttttttgaatgataggaaatacttctattgcaccaacgtccatgtttcgcaaaacattgattatactgcgtctttctatttctttttccatactgattaattttaaaataaaagctcccccgaaccaattcgatcggcagcatcacgctttattcggaggatttacttaactttggggtgtaaaatcaaaaattaagtgaagaaattcattcattatctctctttttatctcgattaaacccgactttacaatctgcataatccccaaaagctttctgtatcatagcaggaagcttttcggctactattttagctgattttatcggcatattctctacatgcaatgagaatgtggcatcttccaaattctcattcctatcgtttttaattgttacttgaatcatgtgattattaattagttaataattttcccgttccaagattattcgctaataaaaaaggaacgggggattttcttatttttgaagtgtcaaatcaaaaaacaagaaaaatatgaataatgaagaaaaagtagtttcatactacaaagaaactttagagaaaaaaatcgaatggactttcagactccaaagcactctgttgactgttgcatctgctacttttgctgtacttgtttctttaagcaatctttcaaccaacaacgcttgcagtcgaattttactattggtggtaatatgttcaaacgcactatccatccttttttcgtgtataaccatatacgagaatcgagcaatgagcaacgtgatgatacgcaacgctcaaaaacgggtagaagaatatatcctctatagcttatacaattccaaaatgaccgtaacgccagccgtaccacgcaataaaatcttcgcaatttgtgagtcaatttcctacatttcatttctattctttattattagtttaacagcctatgcaatttataagatatacacgcagttgtaacgtcaattaaacactgaagtgatgaacggattcgaaccgccgacctcatgtagaaacatgcgctctaaccaactaagctacatcacctttatatacataaagcaaatacctcgatttgccgacaaacgtctaactgatttagttttacaacgatacggcttgaccattaaccacagcattatatcgttgagaagcccgcctacgtcagtaatccctttcggcatgtgtcggcttccaaaacaccattttaccaatatgtcaaagaactcttctctgttgttcccagtctcccttcaagggcaggctcaaagaccggactgggtaccggataaccggcggtttggtttgactttagtgagggttagagaatactttggttgttcttcaaaactatgtccattaagtttcgttgcgattcaataaatttcttcaaatcatcacattgggaaactttctctctataaaatccacgttctgattctaaatctcgtttgagtttttcattctcacctctcaaagagctgatcaacgcgtctcgttcttcaatcacagcttcatatttgtctcgctgtatttctagttcggttcttttatccattgttgtataatttgattaatctccaacgtaatgtgcaccgtaatgagtactatttgagttgtagtaagcagaagcgggaatactgaggttattgtatccctcatgtcttgtagctttagccgctttgttcattacctcgtttctttctgataagaatttatccgttcttgctttcatggcttcctgtgagaaattttcttgaagtttagcaagtctccaagtagctttcagaacctctccaaaagtttttccctgcttcttgcctgaatacttataggttctatgagcatttctcattatttcggataaatcaaatcgtttcatgtctgtcacatttatagagtttcacatttgttttatcaatcaatttttgtatgtttgtatgattgattgatttatgatgcaaatatattgctatttgacgatattgcaaatcgaaataacatttttatatcgccatatgacaatatttaactttttaagcaagcttatggatacgttaatagaccgaattaaaatgattattgaagcaaaaggatattccccaagagcctttgcgatagcaataggattcaattattcaactctgaataattatttaacaggaagaagaagcacaatagattcagaactcatcgagaaagcactcacgtcatttgacgacatttccgcagagtggttattacgaggcaaaggtgacatactcattcaaaaagaagaaacagaaccaggaatggacaaattgaaaagtattgtatataccatagccaatctacaagatgagattaacgaaaaaacagtgcttacccaacggcttttggaagaaaaccaaaaattaaagggtgaactggctatgttgaaaaatgaacgaaatgtaggataaacttatatacgtatgaaaaaaagatttttaatactatccttcttatttgtgcttatatttaattcatgctctgatgacagtattaatttagcaggaacaacatggacttctgcaaaagactggtacggaaaaactcgattgtcttttgaagaaggcactccttatttaagatctttttttgctatatcttttgacttgaaatctttcacaatatataatgttgcagatgataatgaggatttagaatatgaatggaaagaaacggtatcaggtaaatactctataaacgacaatattgtgaatctaatagtagaaaaagacaatttaacaattccctgcgaaatagaaaaagatataatgtattacagtaatactagaatgaaactatataaacaatagaataaatattttttcaaatatgcgcccaattaaaactgtacccccaaaagatgaaagagaatatcctttagttataacagctgaagaaaaggataaagtattaaattatattttggttgtagcaaacgggaaaagaacagctaaactaaattataaagatataccagaccttaggatcagtaaagaacaatatgaaatagttttagaggagttcaaaaataggagatttattgactataatatgtacgatattgaagatattgaatttgatttagagcctggaatatacaattttatagaaagaggaggatttacagttgaaagagacttatacattataaattttgatgttcttgagttgcaattaaaacgattggaaaaagaattaagcccgaccactgcaataaaggtcaataatgttgtcgcaaatgctaaaaacgttacagaattagtgatcgggctcaaagcaataatagaaatgctaggaacctaactctttttatcaggacttccatcaggatttaataacaaaaattgcaatatagatgcagcatgaagaagtttagatgcatacaaggtagaatcagcatgtggatcatagcgataccttctcgctttgaattttttaaactcaacaaagccactagccatttcacctgctaaaattcttaaacttgaaattgtatcccgtacatcattgtcataagacatttctatccttctacgaacagattcacttgttctggaatagcaatcgggataaaaggctgttgcattatcttctttagaagattgttttttacttatccttcttaggacattttttaataacgatttcataaacgcactattttagtttgacaatgcgcaaatataatatttaaagtaatataaaatatgaaatatagaaatcttgatagtacataaaacatcaaatggtcgaattatggtcgaaccataaaaaaaagcaggactatataattgatatacagaatatacaactagatttccaaaaatgtgtctagtttagtttttgtgttgagtgcttcctcgtcggcggacgatctaggaagcactttttatttatctatttatagaacaagctggacaatagcactaaatcaaagaaaaataacataaagtttgattatacctaaagctcttttatattctattaaatcttaatgcatttctttttgcgagcaaagacttgactccgtttgtttatagggggatgctcaaacaagaacagctctccggacgttatactactgatatcaaccaaattataaacattaattgcagataatatgtgtttccacaactccatgtcagccaaagccatcaaagttgccgcccgttacggacgccaatcggatgtagtcgagatttaccaaagcattcttgacgaacagtatcatgtgaatgcgttcactttccccagatatcctatcattacttcttcggacgaagtacaggttttcaactggggactcatccctttctgggtaagaagcgaagaggatgcgacagaaataagaaagatgacactcaatgcccgtgcggataccattttcgagaaaccgtctttccgcgaaccgatcatgaagaaacggtgcatagtgcccagtaccggctactttgaatggaggcatgaaggagcaaacaagataccttattatatatatgtgaaagatgaacctatcttctcgatggccggcatctacgaccgttggctggacaaggatacgggagaggaacacgaaactttctccatcatcaccactgacaccaattcgctgaccgattacatcgataacaccaagcaccggatgcccgccatactcacccgagaggaagaagagaaatggctcaatccctcattgagcaaagccgaaatagcttctttactgaaacccttcgatacagagaagatggatgcatacgttatcagaaacgatttcttaaagaaatctcccaatgatccgacaatagtacaaagggcataggaaaaagaagtttatcctaaaaaagtgagaggtgtgagggaggaattgcaacttttatatttttatttcactgtttctactctctaattttcaactaaaaaaaatacgaatgttagaaatcctctctcactcctctcactttttcccctttatttcatgaaattcggaagaaagtacaaaaagaaacagagttcaaagagtaaaacgtggtgggaaatccggaaaacataaccatcttttccgaacttcccaccacgttttatctagttcgcaccgtccggtgatttactcacccaactcgcctagcaaatcatacgacggcacaaagaaaagcgtccccgttattgccgtactgaaatcgagcaagcggtcggtattgcccgccggactgccgataaacatattctccaacatccggcgagtcgtgctgaatgtactagcatacccaataaaatacgtaccatactcccccttcgaagtattggcaaacggcatattggcacgtacaatcttcagatcatcaccgatattggtcacagcattatgcgcattctccggcttctcttcgtccgacagctccacatcattgaacttatgacgtccgatcaccttttcctgctgttccaccgaaagcgcattccacgcaaccatatcatgaatgtacttctgcacaaacacataactgcctcctgcaaaatccgcatcctcctcgcctatcaccgcaaaatgatagggattctcatcgacagcaggattctccgtaccgtccacaaagccgataatcgccttaccatccatatagcggaacccatgcgtctcatcaacagacaccacagcccctttgagcttctcatcaaggatagaagcaaactcgaaacacagccccatctgcttcgcccgaatatggaacaacaaatcaccgggagtagaaacagctgtatacttctccccttttatctcggagaaagtactcagttctttcggtttacccttatcggggaaaagccgcgtccacgcatcagccccgaatcccatcgtgcaactgaattgcatatcaggaaaacgattgcgcatactacggatcattgccgagaaattggcacatacatcctttactttatcaaccgtatcgggggaatctgtcaggttatagactataaatattacattctctccctgttttccggccacatcctgtgggatatgaccgccgaacgaattttgaaatggattcatattcttttaattttagttttttagtttcgcccataagatatatccggtgataaaaccgaatggctacataggcaagaagctcccggcttcgaccccgtgagcttctctcttctccaatgttactctctcttcttatatataatatactttgtctttatattgtctctctcttttcagtcattccgcacatacatcgcggctccggcatccataaagagttcgacattctccgcatgatgcgctatataagccgccggtcccgtatctcccgagtggcagatttcttccaccacttccgccttcgcttttccggtaatcagaaaaataacaaggcgggcagtcagaatcgggaatccggtcattgcaatgcgtttctgtccgttgcggggatgagtgctggtcacataaatctggtcggaagagagcaaagcctcctgtccggggaagatagaggaagtatgtccgtcatctcccgctcccaacagcacaatgtcaaattcgggccagccattcttcttgggcacctgccggctgacaagttcggaatagcgggctgcttcttttgccggtttctcttcaccacgaatgcggtatacattttcgtaaggaatgggcactatccccaaaagcagggaacgcatcattccataattactatcagaatcttcgggaggaacgcaacgttcgtctacccaataaagtttcatacgcttccaaggagtaatatcagcgtattcatttgcccataaatcaaacatcaaggcgggagtgctgccaccactcactgctatgttgaacgttttgtccggttcagcattcatgatatccaccaagtggaatatcaacgaacgggctgtctccatagacgacgggaaaacagatagtctcatagttcgcaatattggtctgtatttgttaaattcttacacggattggtccagtctgccccatgctcgtgcatcatagcttcactttcgagaggtccccacgtacctgccggatagccgtacaaaggtgcgtccggattatctttccaataacgtaagaccggatcaaagaagttccaggaagcctctacagcatcacttcgagtaaataaggtcggatctccctgaatgcagtcgtcaatcagacgggcataagcgtcaccactcggcacgccgcccaactgtgcgtaactgaaatccatcgtcacctgacggacttcgaaacctgcacccggaaccttcattccgatcttcagcacaataccctcgtttggttgcaaacgaaggatcaacttattagccctcggacagttaccgccggaacagcggaacatctgatggggcgtctcgcggaagtgaacgacaatttccgtcaccttcgtcggcatctgcttaccggtacggatgtagaacggtaccccgctccaacgccagttactgatgcccagcttcatcgcaatataagtctccgtacgcgagtcgggagccactcccttttcctcacgataccccttcttattgcccgaagccgtatattgtccgcgaacgatatgttcattcaagtccgtctccgtaagcggagtcagcgactcataaaccttcactacctcattccggaaattatccgcattgaataccgccggcggctccatagccgtaagggctacgagctgaatcaagtgattctgcaccatatcccgcaaagcccccgccgtctcgtaaaaacctccacgctgctcaatacccagattctctacagcagtaatctccacataatcaatataattacgattccataacggctcaaaaataccattggcgaaacggaaagcaagcacattctgcgccgtctccttgcctagaaaatgatcgatacgataaatctgatgctcatcaaacacagaagagtaaatcttattcaactcaagcgccgactccagatcatacccgaatggcttctcaacaataatacgagaatgaggagtattcagcccggccgccttcaaatgcaaaggcaccaccccatacagcgaaggcggagtagccagatagaacaacaaattatccggatcgacctccttcgtaagctctaccaaacgctcccgcaactgcgaatatccctccactttcgcaggatccatcggcaaataatacaaatgagacacaaaagaagacatcagctccaaattctgctcttcagcctttacaaactgctgcaactccccaagtatatatgaacggtaatcttcatcagaatagacagtacgcccaattcccagaacagtaaaactccccgtcagccgtttatcccgatacagagagtacaatgcaggcatcaacttgcgtttagtcaagtcgcccgaagcaccaaaaataatcattgcaaatttatccatcgtcgtatttttaactttttaccttttatccatccatcaccgcacctaaaccgaccagcctcaaccaaccgacaaaccgaccaatctcaaccaaccgccctaacgcataatcacccacacacccactactacccccacctacaacttaccatccgaacggtctcccggcctcaccgaaggagcgtcaagcggaggctgtatctccggcgtgaagaagggcaggctgtttgagcggagcgagttcctgccctttagccggagatgcagccggagtagctccgtaggtgcagccttgattttttcttttggtacctttcttttgcatcaaggcaaaagaaaagtactcagacattataagtccccgacttcgtctcccctccgtgtcccgtccaattctcatgaaagaactgtccgcgcagctcatccttcctctcaaacgtatgcgcaccgaaataatcacgttgcgcctgcaccagattggcaggtaaattgtcagaagtcagcgaataaaaataattcaaagccgaagagaaagccggaacaggcaattcctccttcatcgcctccgccaccagattcttccatccggggagcaaagacttgatttcctcacggaagtaaggagccagcaacaaatgcttcggcttatccgccgcctcaaaagcagcagctatatcattaaggaaaatactgcggatgatacatcccccacgccacatacgggcaatggaggccaaatccaaattccatccgaaagcatcagaagcccgctgcaacacagcaaagccctgcgcatacgacaccagcttggaagcgtaaagcgcagaaaatatctccttcaccaattccgccttattatatacaggtaatgtatgcttgcacaagaactgcttggaagccagatgacgcaactccttctgagccgagagactgcgttcgaacaccgccgtggcaatcaagcccaacggcatccccaactccatcgcattgatgacagaccactttcccgtccccttctgtccggcagcatcgagaatcttatcgatcagatacccaccggatttatccttgtgacgcaaaatattagaagtaatctcaatcagataactgcgcaacttcccttcattccaacgggcaaaaacgtccgccatctcctcgttcgtcagatcaatgagattcttcatcacccagtaagcctcggcaatcaactgcatatcaccgtattcgataccgttgtgaatcatcttcacaaaatgtcccgacccggcagggcctacccactggcaacagggagttccgtccggcgctttcgccgcgatgctctgcaagacaggcttcacttccggccacgctttctccgatcctccgggcatgatggaagcaccgttcaacgcaccttcctcaccgcccgacactccgcttcctacaaacaagaatcctttcgattcagctaattttacacggcgattggtatcttcgtaattagaattaccaccgtcaatcagaatatctccgggagaaagcaaagggaaaagctgatccatcagttcgtctaccggactgccggcacgtaccatcatcataatcttgcgaggggtggcgattgattccacaaaagcctttatatctgtaaaaccttcaatgtttttacctttagcacgaccattcataaagcggtctactactccttcttccactccggggacggtacgattataaacagagacgtgccagcccttgctttccatattcaaagcaaggttctcacccatcactgccagaccgatcaacccgatatctgttttattctgatttgccatatcttatatattttaaaatattgtttatgtaagaaacacttgaaaagcacatttgttcgctagttttggattaaaatactatttttgtggtcaacaaataactatcagaatgaagaaaatcaagatcggcctgctgccacgcatcattattgctatcatcttggggattgccattggcactatttttccggctccgctggtacgaatattcgttacgttcaacggaattttcagtgaatttcttaacttctccatcccgctcattatcgtcggactggtcaccgtagccattgccgacatcggcaaaggtgcaggaaagatgctgcttgtcaccgccctcatcgcttacggcgcgacgctcttctccggcttcctgtcctacttcaccggtgtcaccgtgttcccctcgctcatcgaagtgggcgtaccgctcgaagaagtcagcgaagcgcacggcattctcccctacttctccgtatccatccctccgctgatgaatgtcatgacggcattgatccttgccttcacactgggattgggactggcggcactgcacagcgatgctctgaagagtgtagcacgggattttcaggaaatcatcgtacgcatgatcagtgcggtcatcctgcctttactgccgctttacatcttcggcattttcctgaatatgactcattccggacaagtatatgccattctgatggtctttatcaaaatcatcggagttatctttctgttacatatcttcctgctcgtctttcagtattccattgcagcactctttgtccgtaagaatccgttccggttgctgggcaggatgatgccggcctatttcaccgcattgggcacgcaatcgtccgccgccaccattccggtgacgctggagcagacgaagaagaacggagtatccgccgacattgcaggattcgtgattccgctctgcgccaccattcacctgtccggcagcacgcttaaaatcgtggcctgcgcactggcactgatgatgatgcagggaatgccgttcgacttcccgctatttgccggattcatctttatgctgggcatcacgatggtagccgcaccgggcgttccgggaggagccatcatggcggcactcggtatcctgcaatcgatgctcggcttcgacgagtcggcacaggcgctgatgatcgcactctacatcgccatggacagtttcggaactgcctgcaacgtgacgggcgacggagccatcgcactgatcatagacaaagtgatgggaaaagggacgggaaaataaaacagacttggtttgcatatacagcataaaataacgaaatttgtcccccgtatcttcaaataaaaaataaaggaatatgaaaacagcccttatatcaggcatcaccggacaggatggttcttatcttgccgaatttctcttgcaaaaaggttacgaagtacacggtatcctccgtcgttcttcctcattcaataccggacgtatcgaacatttgtattttgacgaatgggtacgcgacatgaaacagaaacgtaccatcaacctgcactacggcgatatgacggactccagctcactgatccgcatcatacagcaggtgcaaccggatgaaatctacaatctggcagcgcagagtcatgtgaaggtatcgttcgacgtgcccgaatatactgccgaagcggacgctatcggcacactgcgtatgctcgaagccgtacgcatcctgggactggaaaagaaaacaaggatatatcaggcttccacctccgagcttttcggcaaggtgcaggaagttccacagaaggagacgactccgttctatccccgttctccctacggagtggcaaagcagtacggtttctggatcaccaagaactaccgcgaaagctatggcatgtttgccgttaacggcatcttgttcaatcacgaaagcgaacgtcgtggcgaaacattcgttacccgcaagatttctctcgctgccgcacgtatcgcgcaaggcgagcaggacaagctgtatttaggtaatctggatgcccgccgtgactggggatatgcgaaagattacgtggaatgtatgtggctgattcttcagcataacgttccggaagatttcgtaatcgccaccggagagatgcacaccgtacgcgaatttgccgcactagcattcaaggaggcaggcatcgaacttcgttgggaaggtgaaggcgtggacgaaaagggtatcgacgtggctaccggaaaagtattggtagaggttgatcccaaatatttccgtccggcagaagtggaacaactgttaggagaccctaccaaagcccggacattgctgggatggaacccaaggaagacatcgttcgaagaactggtaagcatcatggtgcgccatgacatggagaaagtaagaagaatgatcgctaccaagcactaacagatctcaaaccgaacgcggattacaccgattaaacaatcttccttttttacagaagatgcgcataaccggagtaatccgtgttcatatatgatacttaatcatggaaaagaatgctaaaatatatgtagcaggacatcacggtttggtgggatctgctatctggaagaatttacaggataaaggatataccaatctgatcgggcgtacgcatcaagaactggatttgctcgacggtgtagctgtccgccgttttttcgacgaagagcaaccggagtatgtgtttctggctgctgcattcgtaggcggcatcatggcaaacagtatttatcgtgccgacttcatttataagaacctgcaaatacagcagaacgtcatcggtgaaagtttccgtcataacgtccggaaactgctgtttctgggcagcacctgcatctatccgcgtgacgccgaacagccgatgaaagaagaagtcctgctgacttcaccactggaatacacaaatgagccatacgccatcgccaagatcgccggactgaaaatgtgcgagagcttcaacctgcaatacggcacgaattacatcgccgtgatgccgaccaacttatacggtccgaatgataattttgacttggaacgcagccatgtcctgcctgccatgatccgtaagattcatcttgcgcactgtctgaaggaaggagactgggaagctgtccgcaaggatatgaaccaacgtcctgtagaaggcgtcaatggcgacagccccaaggcggacattctgaatatcctccgcaaatacggtatcagcgaaacggaagtgactctgtggggcacgggaactcccctgcgcgagtttctctggagcgaagaaatggccgacgccagtgtattcgtaatggaacacgtggacttcaaagatacctacaaagaaggtgacaaggatatccgcaactgccatatcaacatcggaacgggaaaggaaatcaccatccgccaactcgccgaacgaattgtagaaacggtaggctatcaaggcaaactaaccttcgacagcagcaaaccggacggcactatgcgcaaactgaccgatccgtccaaactacactctttgggatggcatcacaaaatagaaatagaggaaggagtacggagaatgtacgaatggtacttgaaataaattcaaaaagaactatccgcattggggctgactaaaaagtcggtagtatctacattctcctccttcgggaaggaggagtggtcgaagaccgaggtggtaggtgaacacataaactaataataataaattaagttatatgcttacctaccacctccccctacgggtactcctccttcccgaaggaggagaagtaagacactaccgacttctaattcagctcattaggaacagactgaaaacaaccggtttttcggattaatccatgttaatgactgcgacatgcattgtggactgtcttaacaagcattgttaatgacattaccatgcattcttatcgaccctaacaagcattgataacttccttttcttatagagagaacagtaatgtcatctgtaaggaacaatcgtgccacaggccggaaacacttgtgccaaaggcgtggcacaactccttcccctatacttcccaacacttttcccatacttccacatcttagtcccttattaccccaagactccccatttccaaaaattcttcattcttaattcttcattcttaatttaattactatatttgcacaatttaataccaaatgtgcaaaaacaatggaaaagagttttatagcttacattgaaaatagtatcaagaacaattgggacttagacgccctgacagattataagggagccacccttcagtataaagacgttgctcgaaaaatcgaaaaactccatatcatctttgaagaaagcggaatccgcaagggagacaaaatcgccgtttgcggccgaaacagttcccattggggagtcactttcctcgccacactgacgtatggagcagtcatcgtccccatccttcacgagttcaaggcggacaatgtgcacaacatcgtcaaccactccgaagccaaattactatttgtaggagacatggtgtgggaaaacctcaacgaatcggcaatgcccctgctggaaggtattctgatgatgaacgacttcaccttactggtatcacgcagcgaacgcttgacgcacgcacgtgaacatctgaacgaaatgttcggcaagaaatatccgaagaacttccgcaaagaacacatcgaataccataaggatgaacccgaagaactggcagtaatcaactacacgtccggcacaacgagctactcaaaaggagtcatgctcccctaccgcagcctctggtcgaacaccaagttcgcgtatgaagtgctcgaactgaaagccggagacaagatcgtctccatgcttcctatggcacatatgtacggactggccttcgagttcctctatgagttctccgtcggctgccatatctacttcctcacccgtatgccgagtccgaagattatcttccaggcattcgaagaagtaaaaccgaatctcatcgtcgccgttccactcatcatcgaaaagattatcaagaagagcgtactcccgaaactggaaacgccgaccatgaaaatcttactcaaagtacccatcatcaacgacaagataaaagcaaccatacgcgaagaaatgatcaaagcgttcggtggaaacttcagagaaatcatcgtaggtggagcagctttcaaccaggaggtggaacaattccttaaaatgatagacttcccttatacagtaggctacggcatgacagaatgcggtccgatcatctgctacgaagactggacaagattcaagccgggttcgtgcggaaaagccgcgccgcgtatggacgtacgggtgctgtcttccgatccggaaaatatcgttggcgaaatcgtctgcaaagggcctaacgtaatgctgggatattacaagaacagcgaagcgacagaagcagtgatcgacaaagacggctggctgcacacaggcgacctcgccttgatggacgccgaaggcaatatcaccatcaagggacgcagcaagaacctgttgctcagcgccagcggacagaacatctaccccgaagaaatcgaagataaactgaacaatctgccatacgtatcggaaagcatcatcgtacagcagaacgagaaactcgtcggactggtttatccggactttgacgaagcattcgcccatggtctgaagaatgaggacatcgaacgggtaatggaagaaaaccgcgtagcactgaacgccatgttaccggcatacagccaaatactaaaaatgaagatatatcccgaagaatttgaaaagaccccgaagaagagcatcaaacgctatctgtatcaggaagcgaaaggataaaggaagtgaaggattaagggaatactctgtgaacctaaactgaaaaaaagagttataataaagatgaagataataaagacaatattcacggcagctgttctgatggctgccgtttgtttgccggcacagaacaagagtgcgggcatcaacctttccttatggaaagacatctgcacacagccgtatgacagcactcagacgacttatgtaaacctcggtctgctgtctacgctgaaccgtctcaacggcgttggcatcaacgcgctgggaagcgtcattcatggagatatgaacggagtacagatcacaggattagccaatcttgccggtggtacgatgcggggtgttcagatagcgggtgtcagcaatatcagcggaaacaacaccgtagggctttccgccgccggactagtgaatatcacaagcgacggctcaaagggggtcattatttcgggacttaccggcatcggtggagacaacaactcgggagtaatgataagcggtctgatgaatgtgacgggaaacatggcttcgggatttcagttttccggcgtgtcaaatatcacgggacagagtttcaacggtatgatgacttccggactcttgaatgtggtaggcgaaaacatgaacggtctgcagattgccggtatcgccaatatcaccgcaaaagacctgaatggcgcacagatcgggttatgcaactatgcgacgaaggctcatggctttcagatcggtctggtcaattactacagggaagatatgaaaggattacaactcggcctcgtgaacgcgaatcccgatacaagaatacaaatgatggtatatggcggtaacgtcacgcccgccaacataggagtgcgtttcaagaaccaactgttttatacgatcttgggagtgggtgcattcgatcagaatctgaacgataaattttctatcagcacgtcttaccgtgccggattggcggtacctgtttacaaaggtttgtccattagcggtgacctcggattccagcatatagaaacgtgctccaacaaggatgaagtgattccccgacggctttatggattgcaggcacgagcgaatctggaatatcagatcagcaagaaattcggcatctttgccaccggtggttacggactgacacggtattacaacaaatccggtaatttcgataaaggagcgatcatagaagcaggtattgtcctcttctaaggctgattaataagtaataggtaataagtattaagtattaggtaataagtattaggtattaaccgtagctatcatttagaggtatatctatctgtcattcaaagttttcatcactttatcaaagtgaaacaattcgataatgacgagcataagtatctgtcatcctgagcttgtcgaaggatctcctcttttgtagtcacaaagaagagattcttcctccttacagtcgtctgaatgacagacagatgcgtctctaaatggcagctacggttaatacctaatacttattacctaatacttaatacttattacctattacttatttatactttctctttaatcaacccgatgcgataagccacaagcaacttcttcaaatcctgaatctgcgtcacaagttccttccctttatcggtgtctttcaccatcatccgttgcgaattgaactccagtacaaagttggttgacttgatatccagcccttcttcaatagctttctgcctggactggaacggctcatgctgcaccagctgcatcccgtgagaatggtagacaagcgtatagcccgcaattcccgtctccggttgataggccttggagaatcctccgtcaataacaaacagtttgccatttgccttcatcggctgttcaccttgaattgtctttacaggcacatgaccattgatgatatgagaatgaggtcccaatgccccgaactcatctaatatctgatcgcagatatcttcacgattgcgaagcgtgtagtaatatcccttcttttccttttgtatctccttgtcttccagaaaatagcgttcgaaagtcgccatcttatctttatcaaacagaggagcttccggaccacaccacatataccagatatagtccatcgcaaattctttatcatcctctccttcttcgtcaaagtatgcggtacgaatcagctgatcggccttatcgagcaacttacgtccccaatattccttgccacgtatcttgacatgcttgaaactgccatcctcattcaaaggtaccgaagcgtggtagagaagattggaattggaaaccagatacattccgccatacgtaaacaggcaacgcatatgcttcttcaacttctcgctattcataaacgaatagtgaatcttttccacaagttcccgttcttcgtcggtcagtcgataaggatcggcagggtctatggtcgggaagtttgtgtcacgcagggcatattctttgccttcgtacacaaagactccacgctcaaaatcgatcttctccaacagcttccggttgctcattccgaactccggacgacggtctattatttcagcttccagcttaaactggataatcgtaatcgccttatgcatctgagtaatcagacgcaaagtcttctcattgtaattgccatcggcaaaattcatcttcggcataaagatggtacacggatcatcggcataagtatccatggcgaaagttgccaaaggaaggagattgattccataaccgtcttcaagagtacccagattgccgtagcgcatggacatacggatcacgttggctatgcaactgtcattgccggaagcggctcccatccacaggatatcatggttgccccattgaatgtcgaagttgtggtaattgcacaaagtatccatgatgatgtgcgctccgggaccacggtcgtatatatcacccacgatatggagagagtcaatggtcagacgctgaatcagattacacatggctataataaagtcatccgcccgcttggtagagattatggtgctgatgatgacattgatatatgcgtgtttgttcggctcgacagacgtttcgtgcagtaattcctgaatgatgtaagagaactctgcgggcagggattttcgaactttggaacgggtgtacttggaagatacattctgacaaaccttcaccaactggttcagagtgatcagataccagtcgtccaggtccttctcgcgggcttttaccagctgaattttctcttccggataatagatcaacgtgcagagttctttcttctccgcttcgcgcagggtattgccgaaaatctcgttcactttgcgttttaccgcacccgaagcattctttaatacatgctggaaggcttcgtattcaccgtgtatgtctgtcaagaaatgctccgttcctttaggcagattcaggatagcctccagattaataatttccgtacttgcatcggcaatagtaggaaaactccgggaaagcagctgcaagtagcggagatcgccaactatgctttcgggagttatattactttgagcagtcattatgtgtactatttaactatttacaatatgctatttatcaacttatcgtttctcgctataaatataacgatttatcatgtacttattacaaattccagcctttaatgttcatcgtcagcccaataaaaacatcaacagcacctgcgcaatgatcacccgcagaaacatacacaacggatataccgtagcataagcgacggaaggattgtcacccggtatcgtatcgttcgcataattcagcgccatcggattcgccatactgccgcacaacataccggatacactgccgaaatctatcttcataatcttgaaagcgacaaaaccgaccagaaccgtcggaataattgtcagtccggctcccaaagctatccaaagcagtccttccggacggaagacggtatcgaagaaatgggcaccggcatccagaccaagacaggcaagatacatggaaagccccaaggcacgcagcatcagattggcgctgcgggtagtgtaagtgatcatgtgtatccgtggaccgaaagttcccagcaggatacccacgataatcggtccgcctgccaaacccagcttcacgggggtactgattcccggtatagagaacgggatcgctcccaatgccaatcccaatacgatgcctataaatatgacaacaagattaggttctttcagacttttcactgcatttcccaatactttttctacattctgaatggctgctgcctcacctactactgtcaggcggtcgcccagttggagaatcagttccggagtggcaagtagttgcacacccgaacggtacacacggctgatattgattccataatggtttcttagcctcaatgagccaagtttctttccattcagttcggggcgggttacgacaatacgctgcgagatcaattcgctgtcgattgcattccagtcgatgtcttccttgttccagtccgtattttcttcctgttcaccgaaaagtactgtcagagccaggacattcttttccgctgtgatcaccagcaggcggtcgccttctttcaataccttgtcggaggtaggaatactgacatgaccgtcacgccacaaacgggaaatcacaaatttcggataactcatctgagctatatccttgatacttttattaaaaatagcggggttatgtacttgaaacgctgcgataaaggttttgttggcatcgtccttttctttaatctccaagtcttctttatgaaccaggaatttacgaatcagcagtacggcaagaatcacaccgatcactcccatcgggtaggctaccgcacaccccaaagccggagtactgctttctatgcccatctgtttaagtgtctgctgcgcagctcccaacgcaggagtattagtagtggctccgcaaaggatacccaccatatcaggaagtgacacacctgtcgcataactggcaacaacagtcagcaaagtacccaacagaactacggccaacgccaacatattcagcgtcacccctcctttccggaaagaactgaagaaaccgggccctacctgaagtcccagtgaatatacgaaaataaccagtccgaaactttctgcataattcagcatctgtggatcaaccgaaagcccgaagtgcccggcaaggatacctgcaaaaaaaacaaaagtgactcccagagatactccccagaaatgcactcttcccagccccagcccaatcgcagaaatcagtgaaagcaccccaactgcctgtaaggcagaatgttcgagaaacagattatataaccactccatgaattaaacatactaatagggcgcaaagataaaaactatttagtcccattcaaaacttttaagcttccatttcgcgccctatctcttctctaaattcttaatatcctgaaatcttatatgttatcctttaaattatctgtctgttatccgcaatctttttacctgtcacctccacctatcgctttttaccttttcaacctattccatgtggtatctttctacctgtcgttatccgaaatctctctacctgtcatcttttgtgtaatcatcattttcttttcatttgccggtactttccatctgccggctattatctcacctacctgtatattctacgaaattattccgaccatccagataaccgctcaaccgatttccaccgatgtatacatcatccagataagatacatcattgcgaccgtaatccattcgaatggaagtctgtgcataattctcccagttccagcggaaatggtattcgaatgtctccacatgtccattaggatattccacccgaataaaatcaacacctgtccggtccaaataaaagtcgagttcctgacggcaacggttaccgtccacatcccgataaaaacttacccatgtacggctacataaatcagaagaacgattgtagtaaccaccaccaatattatcatcatcataaaaactatcgatttctacttcacaagaagtcagactcaacgttaacacagccattaaagccagtcctaagtatctaaatgcgttcgttttcatattcctttatttttaatggttcctttattaatcctatcacttatctttcgatatcacaaaagtagagaatgaattctccttatgaaattgaaaattcctacttgtttaggggaattcacctaatggaagaggtaaatccccccaacgtactggataccttacagattcccagatagccaagaagacacgctcccagccctctaaaaccttaataaacattgaatcaaatattcaattatttaatcaatgttataaatcaagccatttagcccgatttatttgcagatatcacaaaactccgtatatttgcaatgtgtttttcatagtattagatttaaggttaacaaaaagattggctgtctgggatagatagcctttttttatgctcttttttttaataaacttctcaagaagccatggagacaaacgtaaaatggcaaatactgatgtaaaaaatctgatgacaccacaggcttctataataattaataaggtattcgttttctcccatgaatagtgagaaaaaatattctcaaaaaaaataatccgtttaacatttgaaacatagcaagttatctctttcatcaaaaaacaagtaaaaaaaatcttgctaaaagatttgcgtagtccaaaagttccccctatatttgcaccgcatttgagagagaatgcgggttcaaggaagtttgggtgagtggctgaaaccaccagtttgctaaactgacgtacgggtaaccgtaccgggggttcgaatcccccagcttccgcaagattctctagataaaaagagctaagttttatagacttggctctttttaaatctatcaaaagccggtgggttcgtctaacggttaggacacatgcctctcacgcatgtaatacgagttcgattctcgtacccactactcttattttagttagcctcttacattgaagtaagaggcttttttattgggttcatatctcaagaaatggaatataacgtaaaagaattaaaaaaggtattgattgaacaatgcaaagaagaaggtatttattacgcattgatagcaatcaacaaacaaacgaaagagatcgttttgccacaaagccttgataacgctttaaataatccggattactgcgtctttaaatgcaggaaagtgaaggatgaatataaagtagaagaggtaaaataagcataattaaaaaagaaggatatgcttattgatattgtattaagatgttaaaagatttaataactatttgagcattcaaagttttttctgtaaaagaatgttatatccatgtaaaacgattgtctttcacatggatacccgtcaataaatgaagaaaaacgctgcttacttacatttcttcactctgctcgtacaattcaaagtaagactctttatcaatccgcagtcggactctgttttcccgcttctgaccggccagattgataaataaattgaagtataattgactaaaagagaggtcggaacgatcataagtgatatcgaaagtacaggttcttcggaacgaatcgaaagtccccagcttcataccacccttgcacataaagacttcggggaaattcgcaggcggataaggctgaaacaagctggccagctgcgcatacacataatcgatcatccattcgtcaccggatacaagcaattctcctttcagacgaagtttgactgcatatttagccgtgacgtcctgagaagtataaataggaacctgactctccgacgggtaattaccatccttatagccaagactcatagtcagttttgatttacccactccgttgaaatctgcgacgttctgatctttctgttgatttttcaagtcaatcataaacgtcagtttacccaaagtcggatcattcggatattgagctatcgtatccagcacataatcttcttcattaaaacttcgcgctaccaatacatccccctctccgacttccaacgccggacctcctctttcaatatccacatcgcctacagggtaatatattgcatcattatctctgacacaacctgtcagacaaagcagtaaagctgccattcctactatcttattcattatcatatacatccttattttggagacaaagatacatcttttttgaatcaacttgatttatatcaaccgtttttagtacttttgcacataacaagactataatgacatggatacactactaagagaaactgtaaatgccgtcgtaaattcccgctttcccgaaatgagcatagagggacgccggcagatagaaagcatcctgatacgtgaagaatatcctaaaggagtgatcgcacttaatgaaggagaagtagcccatgaattagtttttgtcgggaaagggatgctccggcaatattattataaaaacggaaaagacgttaccgaacacttctcatacgaaggctgtatcctgatgtgtatcgaaagcctgctgaaacaagtccctacccgattgatcatagagacactggagcctgctgtcatctatctgttcccttatgacaaaatgatgcagctgacaaagcaaaactgggaaatcaatatgttctatcggaagatacttgaatattccctgattgtatcgcaaaccaaagccgattcctggcgtttcgaatccgctcgcgagcgttataatctattgctcgaaactcatccggaaatcatcaaacgggcacctttggcacacatcgcttcttacctgctgatgacaccggaaacattgagccgagtgcgttcaggcgttctgtagttttgtaattttgggagctatctgcttttccggtattctttgggagacataccggtataatgcttaaagtatttaccgaagaatgactggttggcaaagtttaaacggtcggctatctcctgtatgttcatgctcgaagagttcaagagtgccttcgcttccaggatcactaattcgtcaatccactcccctaccgtcttcccactgacttccttaacaactccggacagatgtttcggcgtcagacacaactgatctgcataaaacttcacgctacgctccgactgataagactgaaccaaagattcataaaagcgctcaaatatatattctttacgacttttacttttgacaacggcagaagcatccggagcataactgttgaagatattgcaaagctcaaagaagaagccctgcatcaatcccattactacctccctacggtacttatcgtctttatttctcaatctctttctgataaaagcgtaatactctttaatcatttcctgctcgtgcaggttgagatcaaagcaagggtaatctttcagaaagaaaaagaaggagagcacattacctactttgggcaatgattccaacagactttttgatacagcaaagaaaatccctctgaaattggaactgaactgacgatgttcgataatctgattgggcaacgcaataaccattctgcccggaatcagttcaaactcacgcagactgatattaaaacgagtagagccttccagacaaagtccgatgctcaccacttccagtttactggggccattataaagggaaataacgctctccgtgtcgaagagcgctatatcattgccgaccacatcaatactatccggatctatttgtttagaatgaactaccgaagaaatacctatcttaggaacaacttgaatatccatacactctctcttttggttgcgacaaagataccagtaataatgagatattcaacctaaggcgagagattatctgtcaaaaagaacacttttgcctacttattgactatctccgaataaaaacttataatcacgttcggcagccggaacagtccacttttcaggaacgaatttccattggttcaatgccttcgggtccatagtacctttgttttctatataattcatcagatagaaacgaaggtccttatccgtagagaagatgatacgttctttcaatttctcctgagggatgcctgatcctttcgtcagcagttctccaccgccattcccccgataagagttcaaagccaccttataaatcttatccatgaagaaaggactaccgtctgccatgctgacaatcgttatcttctccccttgcggcttggtgacgtctacggtataaataattcccgatgccgaatcaaaattgaagctgaaattttggaaagaagctctgtcctccgcaccttctcgacgtttctccttaaaccaaagcagatgatcgtccggagacttcatccggttggtccacatgaaataagacatttccaaataatccttgatttcttttccggataaagtcatcatatatagcatattctcatacttatacagattgaacatatcgctgacaaacacatctcctttattaattttcgcatcaaatgaaagcggtgccgcaaaggatatctccgcaccggtgatgtcaagctgcaaggtatggatcaagtcgataaaagcagacggtccgaagaaagaaggacgcgttgagatactctcggtgaatgtaccgatctttttagagacaaagttacgaacagtgtcatattgaggagcaaaatgcttcataaagtcctcgctgattccataatctttcgtttcggtcaatactccttttatatctttgctgcgcacctttccatctttcagtttcaaggtcacatcgatgttggacagaacaattccgttgcttgctggatcgatgaccagcaccgaatcacctgccacattcatcactttcttacattcgcgcgcatgatcgtgccccatcagtacaatgtcaaaaccggggacattcttcgccacactcagagaagcgttttcgttatacttgccggacattttgaaagcctcctgccccgcatggaacaagccgatcatcaagtccggattctctttttcacggatgatcttcatccatttgcgtgcagtctcctccatgtcgtcgaaacgcagtcccttccacaggttctccgagagccatgcagggatagcaggggtgatcattccaaggattacgattttcactccgtcacgttccatgaccttataaggaggaagatgaggttctccggtcgatatatcgatgatattagctcctaatacgggaaagtcacaggtatttatccagcggtcgaacacggctcggcctgtctccacatcatgattacccatatttccggcatcatatttcatgtagttcatcatttccgcgcataggtggggtgatactgtatctatataattatagtaataggcagtcggttgcccctgcaatatatcgccgttgtcgagtaaaataagattctccttatattgttcgcgttctttctccacaaaagcgtatattcgtgccagactgccctgccaatccttacgggtaataaaattataaggataataattaccatgtacatcacttgtctgtacaattttcagcttcactactttttcctgtgccgcaattgagagcacgaggcaaagaagccatacgtaaacacatgcaaatcgtttcattctttttctattttaagcggatgtgagaacatgaaccgtgcacctcccgtatattcggagtcgatccatatatcccctttccatttatgcacaatcaatttacagatagataatcccaaacctgttccctgggcatattcgttcagcttctcgaagcgctcaaataccagtttctgtttctctttcgggatgccgcaccctgtatccgtcacagagaatacagccatctccgtctcttcattcaccgaaaattccagtgttatctgccctttcctggtgaacttatccgcattagacatcagattgataatcacctgctgcatacgctgtatgtctgtcgtcatccgaaacgactcataatcgctgacaaacaggaactgattgccggactgccgtgaaacgctgacagatgccaccacctgcctgcatagctgcaccacgtcacactcttcccaagtcaacgtgaccctgttcgcttccaggcgtgagagatcaagaatatcattgatcaggcgaagcaacaaatccgaatttgtcttgataatctgataataggtctgctgttcttcttccgtattgccacccacagcgagcacatccgagaaacctacaatggagtttaaaggcgtacgtatctcatggctcatattggcgaggaaagcacttttcagacggttcgattcttctgcacggtccttagccacccgcaggtctttttccgacttcagcagatcgtccttcagacgtttggtgcggaaatagtagaagagcgagatgcacaaacccagcacaaggatgagaaacagtgcacacgccgaccaaatctgataagtatattgctgatagaatgatacagtctgattaataatctccacatcaaaaggaaggatatccgggtccagtccccactccttcaccttccggctgtccagtacggccttgctgccaatcacggaaaggtgctgctgttcatccgccggatattgatcaatctgtacagatgccaatgccatgtcctttcccagtttccggtaatcgggcagcactccgccgatcgcccaataccccagactcaccgatgagggagtaaaagtcggaatggtcggagtaacctccatcatggcataagtagcattccgcatgaaataaccttcgttcatatccacacgccacgtgcctaccatgatcaccgtattctccggtaaatgacgcaattcttctacaatcgtatagatagtatgccgccggccgtccatcaagatcaggtcgatttcgggaaacttcttcatttccttccgcaccagtgcctgcatggtgacgccgccgtaagtattgtccgaaataaaagcgatgtgttccgtcttcggataaaacaccttgatcatccggacgttatcttctatattgtactgattgataaatcccgacttcaattccggtatattcatgtggtcggtaaagagatcgaccgattccggcatccatgtgtccagtccggcaaccgtatcctcgggcagtatgacgatgttactgctgacgagactacacatcaccggcaccttcacctgtatcgaatcccgttgcgacagatacgccgcccatgcttcctgtcccaacagaataatctgcgccggatgcttctccccttgatatttagaaagaatctgcgtcatcataccgctccaaagcggggcttcggagaaacttttgcagttcatgttttcaatgataatatcgcgtttccctcccaatttgctatattcttccatatagtcggagatagtgaccgaagtttgatgagcggcgggattgtaggagcagataatcaggatgggtttctgatcgttagagacagcaaataacgctgtggcccggaaaagccatagtaaacagataaacaggcatcctatatatctcatcatacttgtaagttttgaagtgttactatctcattttagcttgcaaatatactaaaacttgtcggctataacagatttatgtgtatttttgtcgctcattcattcacaaaaaaattgtttatggaactatttcatcaaatgatttccggattactgggaattccggaaagacaaatcagcagtaccctccacttgttgggcgaaggtgccaccatccctttcatcagccgttaccgtaaggaagctaccggcggactgaacgaagtacagatagagaacatcaaggagcaacatgacaagttgtgcgacatagccagacggaaggaaaccatcctcagtaccatcaacgagcaaggcaaactcactccggagctcgaaaagcgcatcaacgccacctggaatcctacggaactggaggacatctacctcccctacaaacccaaacggaagacccgtgccgaagcggcccgtcagaagggactggaaccactggccatgatcatgatgctgcaaagggagcctaacctcaccgccaaagccgccaccttcgtcaaaggcgacgtaaaggatacggaagacgcactgaaaggtgcccgtgacatcatcgcggagcaagtgaacgaggacgagtgtgcccgcaacgccatacgtaaccagttcacccgtcaggcggaaatcaccgccaaggtagtgaaaggaaaagaggaagaggccgccaagtaccgggattatttcgacttctccgaatcgctgaaacgctgcacttcccatcgcctgctcgccatccgccgggcagaatccgaagggttgctgaaagtatccatcagtccggatgacgaagcctgtctggaacgcctcgaccgccagttcgtacatggcaataatgaatgcagccatcaggtaaaggaagccactgccgacgcatataaacgtctgctcaaaccttccatcgaaacagaatttgccgcccagtccaaagaaaaagccgacgacgaagctatccgcgtatttacggagaatctccgccagttgcttctctctcctcctctcggacagaaacgggtgctcgccatcgaccccggattccgtaccggctgcaaagtcgtctgcctcgatgcgcaaggcaacttgctgcacaatgagaatatctacccgcatcctccggtcaataaaaccggtgaagcggcctccaaactccgcaagatgatagaagcctatgaaattgaagccatctccatcggcaacggaacagccagccgcgaaacggaagactttattaatcatcagaccttcgaccggcagattcctgtattcgtggtcagcgagcagggcgcttccatttattcggcatccaagatcgcccgtgacgagtttcccgattatgacgtaacggtacgtggagcagtctccatcggtcgccgactgatggaccctctggcggaactggtaaagatcgaccccaaatctatcggtgtgggacaataccagcacgatgtagaccagacgaaactgaagaaagcccttgaccagacagtggaaaactgcgtgaacctggtaggcgtgaatctgaataccgccagcagtcatctgctgacatacatatccggtctggggccgcaactggcacaaaacattgtcaacttccgtgccgagaacggagctttctgttcacgcaaggagctgatgaaagtcccccgcatgggtgccaaagccttcgaacagtgtgccggcttcctccgcattcccggagcaaagaacccgttggacaacacagccgtgcatccggaaagctaccacatcgtagagcaaatggcaaaggacttgaaatgtagcgtagacgaactgatcgcgaataaggaactccgccaaaaaatcaagatatcggactacatcacaccgactgtgggcctgcctaccctgcaagacatcatgcaggaactcgacaagccgggtcgcgacccgcgtaaagcgatcaaggtatttgaatttgacaagaacgtgcgcaccatcgcagacttgcgcgaaggcatgattctgccgggcatcgtaggcaatattaccaatttcggagctttcgtcgatataggcatcaaggagaacgggcttgtacacctctcccaactggccgaacgatacatctccgatcctacggaaatcgtgtccatccaccagcatgtcatggtcagagtgatgaacgtggataccgaccggaaacggattcagcttagcatgatcggggtacagcaagactgatcgcctcccgtttttctccccaccaaacaattaaaatcgtaaagataatcatcagtactgtacaaatgagcgagccttcaaacccgaaggctccgccattcagtacgttctcttcgggcagatgcagcgtcagcagggatgtcccaaagtcatttccacttacctgatagcccagtatcgggccctgaatccagttccagaaaagatgaagggaaatagggaaacaaagattgcgcgtatataaataggaagcgccgataaacatacctgcaagtaacagattcagcataggcaggaaggcaaggttcggattgaagaggtgcagcaatgcgaacagcagtgcggagacaaaaagagacaggaatttattcatccgggtatgcagcagacggccgagtatatagccacgcatcatgatttcttcggccagagccaccagcaggcagaacacaaaggtagcaagcagattcagaggatcgaattgaaagccagttacttccacctcacccaaagccaaagacagtccgaagccgatcaagtagagaaggatggctgccagcagtccgtaccacaatccccgtgcatgacctttcagtgtcagtcccaggtcagagaaagggcggcgctcaaaatagagcagaatcactgccgaagtcagcacagccagcagcataccggcttccgccaccatatgccccaacaatccggggtgccttgcctcatcaccaagaatcagagataaaactccgaagcctatcgtactatacaatccaaaggtgacgaaaagccccagtgcaaacaacaggatgcacgcccatacgggaagtctcttcggttctttcttttctctgatttcttctgtctccatttttactttttgttaatcacgctacaaaattagatataaaacataaaaaaacatcgtgtcttacctatttttcctatatttgtctgaacaaatctgcataattatgaaaataagacaactactgataagttttttattggctgccagtactttgggagcaaccgcacaagtaagcaaaacgtattatgtcagcaagcccggcacattgatctcgatgatgacggaagaagaagccaacagcatcacccacctgacactgacaggaaaactgaacgcagaagacttcagacatctccgcgacgagtttcccagcctgaaagtgcttgatatctccaatgccgaaatcaagatgtacagcggaaaagccggcacatatcctaacggaaagttctacatctatatggccaatttcatccctgcctacgctttctcgaatgtggtgaacggagtgaccaaaggtaaacagacgctggagaaagtgatcctttccgaaaagataaagaatatcgaagatgcagccttcaaaggatgtgacaacttgaaaatctgtcagatacgcaagaagacagctcctaacctgctgccggaagctctggcggacagtgtgaccgccatcttcatcccgctgggcagcagtgatgcctaccgttttaagaacagatgggagcactttgcatttatagaaggtgaaccgctggaaaccaccatacaggtaggcgcaatgggcaaactggaagacgagattatgaaagctggtctgcaacccagggacatcaacttcctgaccatcgaagggaaactggataacgccgacttcaaactaatccgcgactatatgccgaatctcgtatctctggatatttctaaaacaaatgcgacgactatccccgacttcactttcgcacaaaagaagtatctcctgaagatcaaactgccacataacctcaagaccatcggtcaacgggtattcagcaactgcggacggcttgccggaacacttgagctgcctgcgagcgtgacggctatcgagttcggagcgttcatgggatgcgataatctgcgctatgtgcttgctacaggtgataagattacaacgctgggcgatgaactcttcggaaacggggtgccgagcaagttgatttataagaaataaaaaaagtataatccacattggacattgatttatgctatgtagaagatacgaggatagatcgaaaataaattagctattagcatatttcgattagctattagctaatttgtttttgctaatagctaatttcgatttgctcatagcgtatttgaaagaaaagaatgacaaaaccgatcaattatttcacttcgtcattggcatagagagaaaaagcttctcgtttgtcacaactttcttttatttcataatttctcccgattttcacaactcttttttcttatgacaatcaaggaaaagtcacgaatttccttcctttcaaagtccaataaagtccagaaagtccatattagatttttagaatacacaatctgcgatataacttactatatttcaagcattaacaccttaatttattaaataataaacagcgcttctagagaagtttaattcctctcccgcaacacatgaatctttagccccaaaaactgtctaagcttctccgaaagatgcgagatatgtcagacgattgcacgttttcgtgtcttcgacaaagcttctcacgcaggtgttgaccattttattatgttcaacgtaatatagtaaaatggcgaacgctacttcgatatacgtgcgactgatattgtcaagaataaataagaagactgttcaacatcttccggttcgtccggcaacacacgtaacaataaataacaacaactattcatcctattcacgttattttcttatgatggagacacattttgaagatggtgggaatcagattgcaggtttagtccgggaaaatttaaatatgcccgccaagtccttctctgctcatttcttcctcgtttttaatccaatttccgttttctgaaaatcctatagtggacttttgaactttactggactttgctggaggaattttggaactttcgatctctccctcagcaacacatctaaataaactttattttacaaacagtacaatacaagtttatatacttcaatatacaaaaggaaagggaaaagcaatgtgacgacagtcaacaagcatttccctttatttaacagtaaggtactatttatactaccttctatacattattcagtgtatccggctgatacaacacgctatttatcaccgtacatcttcgccctcaactccttgatatggtccgaagtgatatattcgtcatattccatcatcttgtcgatgataccgttcggagtcagttcgataatgcggttggcaaccgtctgaataaattcgtggtcatgcgaagagaagaggatatttcctttgtacgtcttcaggttgttgttgaaagcctgaatagattccaggtccaagtgattggtcggagtatccagaatcagacagttcgcattgcggagctgcatacgtgcaatcatacaacgcatcttttcacctccggaaagtacgctgactttcttcagtacctcttcgccggagaacagcatacgtccgaggaagcccttcatgtacacttcgttaccttcaccgaactggctcagccagtccaccaggttaaggtcagtgttgaagaagtccgtattgtccagaggcaggtaagccgttgtgatggttaccccccagttgaactgtccggcatccggcttcatgtttccgttgatgatttcgaagaaagcggtcatcgcacgcgggttgcgtgaaaggaataccactttgtcgcctttttcgatgttgaagttcacgtcgctgaacagcactacgccttcttccgtcttcttgctcagtccggaaacttcgaggatctggttgcccggctcgcgttcgggagtgaagatgatgcccggatacttgcgtgaagaaggtttgatttcttctacgttcagtttttccagcatcttcttgcggcttgtggtctgcttgctcttcgctacgttggcactgaaacggcggataaattcttccagctctttcttcttctcctcagccttcgccttctggttctgctgctgacggagcgccagctgactagattcgtaccagaaactgtagtttccggcaaacatattgatctttccgtagtcgatgtctacggtgtgcgtacatacggagtcgaggaagtgacggtcgtggcttaccaccagcacggtgtgctcgaagttggaaaggtattcttccagccaggtcactgtctccatatcgaggtcattggtaggctcgtccagaaggaggttgtcggggttgccgtacaatgcttgcgcaagcatcacacgcaccttttccttaccgctcagctcacccatcaatgtataatgtttgtcttccttgatgcccagaccgctcaacagcatggctgcgtcactctccgcattccatccgtccagctcggcaaatttctcttccagttcggatactttcagtccgtcttcgtccgtgaagtcttccttggcgtacaatacttcacgctgcttcataatgtcccacaacacggtgtggcccatcattacggtgtccattaccgtataagcatcccatttaaagtggtcctggctcaacaccgacaggcgttcgcccggtcccagggcaatcgtaccggtcgtcgggtccagatctccgtagattgtacgaaggaaggtggattttcccgcaccgttcgcgccgataataccatagcagttgccacttgtaaatttcaggttcacgtcattaaacaagactcttttaccaaactgcaccgaaacgtttgaaactgtaatcattttctattatttactattttaccagttactatattattatttgagcgtgcaaaggtagacatttaaaatgaattatgagctatccggaatgtgtcaatctggcataaatgtattacctttgccacgttttttggcaaaacggtcagattggcaaagtttttgcttgggaaattgatattatgaataaaaaataaaaataagatatggatccaaaagaaaaagaaaagatggctgaagagctgaatgtggaagaaacaaaggatacggcggaagaacaaccgcaaaacgatcaggcagaagaggccgctcccctgactcatgaggagcaactcgaaaaggagctggaagatgctcaggctgtcatcgaggagcaaaaggacaaatatctgcgcctgtccgctgagtttgacaattaccgcaaacgtaccatgaaggagaaggcggaactgattctgaatggtggcgaaaagagcatcagcagcattctgccggtgatcgacgactttgaacgtgccatcaaaacgatggaaactgccaaagacgtgaaagccgtgaaggaaggtgtcgaattgatttataataagttcatggctgtcatggcacagaatggtgtgaaggtcatcgaaacgaaagaccagccgctggataccgattatcacgaagccattgccgtcatccctgccccgtcggaagagcagaaaggtaagattctggactgcgtacagacgggatatacgctgaatgacaaggtgattcgtcacgcgaaagtagtagttggggagtaaatacaaaagttagtttagttaagaagcatggcagaaaaaagagactattatgaagtgctggaggtgacaaaaaccgccacagtagaagagattaaaaaagcctaccgcaaaaaagcgatccaatatcaccccgacaaaaatccaggtgacaaggaagcggaagagaaattcaaggaggctgccgaagcgtatgacgtgttgagcaatccggacaagcgttcgcgttacgaccagttcggtcatgcgggagtaagcggtgcggcgggcaacggaggtccgttcggtggtttcggtggcgaaggaatgtctatggatgatatcttctccatgttcggtgacatcttcggaggtcgcggcggcggtttcagcggcggcttcggagggttcagcggtttcggtggcggtggttcacagcaacgtcgttatcggggcagcgatctccgtgtcaaggtaaagatgactttgaaagaaatctcgacaggagtagaaaagaaattcaaactgaaaaaatatgtgccgtgtaatcactgtcatggcacgggtgccgaaggcgacggcggttcggagacttgtccgacctgtaagggtagcggttcggtgatccgaaaccagcagacgattctgggtacgatgcagacccgcgccacttgtcctacttgtaacggtgaaggtaagatcatcaagaacaagtgtaaagagtgtgccggcgacggtatcgtatacggcgaagaggtagtgacggtgaagattcctgccggagtggcagaaggtatgcagctctcgatgggcggcaagggtaatgccggaaagcataatggtgtgccgggcgacttgctgattctcgttgaggaagaaccgcatccggacttgatccgcgacgagaatgatctgatctataacttgctgctgagtttcccgactgccgcactgggcggtgccgtggagattccgacaatcgacggcaaagtgaaagtgaagatcgactcgggtactcaaccgggtaaagtgctgcgtctgcgcggcaaaggtctgccgaatgtcaatggttacggtacgggagatttgctggttaatatcagcatttatgtgccggaagcattgaacaaggaggaaaagagtacgctggaaaagatggaggcttcggacaacttcaagccgagtacatcggtgaaggagaagatcttcaagaagttcaagagcttctttgactagctttctttgactgggtctgtttttaagatcatagtcattcacacagagatataataaaggcttcggtgttcgttatgaatgccgaagccttttagtttgtattgggatattatagcaaatgaatggatgaatccggctaatatcccggattctgctccagttttgtattcatcacccgtatcttttccggaatcgggaatacggtggtatatccattattctcagcaggaagttgcggacgactgctgtatgctctcgtgaacgctccgaaacgaatcaagtcctgccgtcgccaaccttcccaagccagttcgagctgtcgttcggcaaggatattttctaatgtagccgttcgggaggaagcgttgacacgcccgcgtacttcgttcagctcggcatctccgtcttccccattacgaacctttgcttcactcttcatcagcaggacatctgcataacggaacagtacaatgtcgttctccatcagtttaccgtccttggtagccgtttcgtctacttcgtactttttcatgcgtgctcctgccgtctgctcatagggagtgttcgagatatccagttcgactttccacggcaaatattcgagaacgtttccatcgtccagacggactatatttccttttaaatcatacacgactccggcaaaatagcagatgtcgaaacgcgggtcctgttgtgccgtttcatagccgaaggtttccaaagcttcgatagtggcactcggtccgttttcaccgctcagtccgtaggctttggcgtgattgtaatggcgggaacggaaaaggtattgcatctggttggtgtacaaggtcttgttcatcgggatggtgaagatgttctcgacagacggttcattgaatacggcaaagttggttttgtaatccggttccagacgatagcccatttcttgcagttggtcacagtaagcgataaccgtctgccaggcattgaggcggttgccgtctacttcgaaaaagagattctttccgtcgggacgccgtccgtccgtccagtcgttatcggtatagacttcggcattcaaggcaagcttcgccaagaggaaaacaactacgggacgggtgattcgcccgtaatacggaccggactggttgctgtggacttcggccagcaaaggggcggattcttgcagttctttgaatacaaagtcgaatatcgttttccgttcgctctgcactacgtctttcatcgacggggatgaggtaagtacaagcgggacacgtccgaacagatccatcaggtaatagtaatacatcgcccgcatggcgcgtacttcggcacgataggcgggaagttcggcatctgtgtgggtggcactgaatttgtctattcgttcgatggatttgttggacagcatcaccactttataaagatattcccaagtggcttggatggcatcgttttctattccccattggtgcaggaacagaccttgccaaaagccgccgtcgtaccagtcgccgccacgggtggggataatggcttcgtcggtggtgaaggtgttcaggtcatagactcccctacccgtcccctgcaatccctgactgtcgctataaccgccgatgtaggtgtaaagtgaggctacagcattcagatatacatccgagatattgttgtagacttcatcttccggcagtttgtctttgggactctcttccagaaacttgtcgcacgagaagaaggtaatgcacacaataagaaagacaactgtttttttcaagttcatcttccctccaagcaaatttcccccaagcagagttgcttttccatcacgtagagatttactctttaaatgccatccttgctgctgcaaatatcgctttatctttttcattatcgttttcctcctccgttaaaagttaatactcaatcccaacgtgtaagtccgcgctaacggatatccgcgtttatcgtccagccccaaagtggagttgaccgtcgaactgttgatcatgggtgaaagacctgaatagccggaaatcgttgccaggttgttgactgtaaatgccagtcgcagggaacggacatatttctttagcttctgcaccttttctatcggtacgttccagccgagtgtcacgtagtcgaaattgacatacgctccgttttccagccagtagtcggtggcggtctggtctttgatattgcgtgcgggagcttcctgcatcacattgtagtcggggaatatgttcatgttcatataggtcagagaggttccgttgtatattttgtgtccgaaggcgccgttgatctgtacagaaatatcaaaacgcttgtagcggaaactgaggttcgatccgagaattgttttgggtacggcttgcccggccacatagcggtcttcgccatcttcgaggctgacaccgccgccattgaggtcggctatgtcataggtgtagccgccgtttccgtcggaaacgagtccgttggcacgtggcagatagaagacgcccagcggctggcctactacttggtaaacgatgtggttatagcctccgtgaaagccggctccgtcgaggctggcgagactcttgtattcgggggcggaaatcagttcgccattatacataccgctcagagagagcagtttgttctgctggaaggtgatgttggcgttgatgttcagttccatgtcctgcgtcttcaacggggtgatgccgatggctatctccagaccgctgttgcgcatggagccgatattcgccagcagggtgttgtaggtaaagggcggcacgcttacgttgtagaggtagagcatatccgtcgttttggagttgtaataattggcggagagtagcaggcggttgccgaacatagctaggtcaatacccgtattgaaggtgtgtttcacttcccacttcaagtcgggattcgtgtttcgcaagtcgcccaatgagacggctgccgagtttcctacgggaatcactccgttcggtttgacaaggctcagcgtggtgtaggagtcgataccgctctgattgccagccagaccgtaacctatacggaacttcagattatcaattacagggaggcgtttcatgaacttttcctcactgatcacccatgcggcggagacggagggaaagaatccccatttgtgattggctccgaatttggaagaggcatcggtacgggcggtcattgtcagactgtagcggtcggcataggtgtagttgaagcgtcccatgaaggaggccagatgcggttgctcgtagtacgagttggttccttcccacggacggagagcgccggcttgcaggttgtggtagccgaatttatctgtattgaaattggtgactgtggtatagaatccggtgtatgtctccttctggagttccgccagtgccagcgcgtcgaagtaatgcttcttccagcctttcttgtaggtcagcatcatgttacccaggagggattccatctttttcgtgcctttgtatgcctgtccgtgcgcccagacggaggtgggcaggtattgggaattttcgactatattataggtataggcaccgaagagtaccagtttcagttcgtccatcaggttgaaagtcaaacgggcgtgggtactgatatgcgaggtggcgtcatgatcctgcacttccatccatgccaacgggttcgtgatctgactggcggtagtgattccgtcccatgaaccggaatcggggtctttatgattggggtatgtgggattgaaagtggcggcagaatagaaggttttctgaaggtctaccagattgtgattcttctggatagaaccgaacatgcccagttcgcagttcagaaaaccgtcgaacatcttttgggtcatgttcatattggaggtgaagttcttcatgtcttcgttcagtatgactccctgccggtccatgaaaccgagggagacacggtagctggattcattcgagcctccatagaaggcgatgtggtggttttgctgcaatcctgtttgttctatctctttctggaagtcggtgttgtttcctttatccagtatggagatgccacgttcagatgcgacccggcgaaagtcatctgctgacaacattttcagattcttatagacggtggatataccgaaaataccgttataactcacttgcgttttaccgctcatgcccttcttggtggtgatttcgatgacaccggaggcgcctcgtgatccgtactgtgccgtttcggaagcatctttcaggatggtgaaactctctatgtctgtaggataaatggaggtaagcatgctcaaatcgccgaagactccatcgacgataattagcgggtcgtttccgctggtcaatgaggtggttcctcgcaggcggactgcatccaaggcggcggggccgtttgtcccacgctggatggtcaggcccggtactcgtccgcgtatggcttccagcggattcgtgatctggtctttattcatctgtgtctccgtgattttctccactgatccggatatggtttttaaacttccggtggcgtatcctaccgttatcagagagtctatcggagtgatcgtttttctctgggcaagggcacttccactggaagtgatcagaaagaaaaggctccaaatagtaagtctgtagtgttgtttcataattatcattttttaagggataatacaaatataacaaaaaaagcgggtatctggttgtccggatacccgcttttctttgatatgggatataaaaattatattgtcaacgtagatgaatacaacaaaccgcttgattggggaaaatcaagcggtcggctatatctgactgactatatcttgggggatatactgtggtcaatcagactgaaacgggctatcgtttattcttaggtttattcttagaaccggattacgatttagtacctttttcctgtccgtaaccgtatccgtaaccatagcgtttgccatatccatagtacttgccatatttaccgtagccgtagtagtagccatacttcctgcgtttcaggtctacgccgttgattacagtacaaaggttaggcagtttcttttcttcggcaagttcgttgatcagtgtgtactctactttatgggtatagtcggcacgacaaacgtagacggacaagtccgctacacgaccgatcaacaaggtatcggtaaccatgcctaccggtgcggtatccagaatcacatagtcaaagttcttcttcaagatctctattgccttgtccagaccatcacgcgctaacagctcggtcggattaggaggaaccgttccaccgggaaggatatacagattctgattaatatccgaaggttgtaccagactcatcaaatctgtttccgggtttgcaaggtataaggtaatacctttctcttttgtcgaaagacggaagactctattcaatcccggtttacggatatcaagccctacgatcactactttctttcctaataaagagagactgatggctaaattggcggagataaatgattttccttctccactgacggtagaagtcacaagaatcaccttcttgtcattctgaagcatgaactgaaggttggtacggatgtttcggaaggtctcgctcatcaggttgttctgattctcaaagacggcaatagaaccgtctttttcgttcttctcgtcggttaatgggatatcaccgacgataggaacggttgtcagtttctcgacatctgcacggccttcgagtttgaacttggtcaggccaatcaggtagatgatgcctacagggatgccaacgcctaatactaaagcgatcagataaatcattctacgcttcggagaaacagggatatcatcggcgatagcttcatcaataatctttgcattgtttgcagtagctgcaagtgctatggcgttctcttcgcgtttctgcaaaagcatcaagtatagtccagctttaatttcctgttgacgggcaatacttacaaactgacgttcttgtccgggagcatcactaatacgacgagaaaaacggcttgcttcacgttcaagatcagcttttgtaattaataaacctttcaatgatccgtcaagggtcgcctgcacattcgacttcatggcacggatgcttgtatccagattgataatcgtaggattattttctgtagaagtacgtaataaacgcttccgttcaactaacatttcattatatcgttcaatcgttgcaaccaatcctggatcttgcaagcctatattacccggaagaacttcgtattcatttcctcttatatatttccgcaaatcttcaataaggctgatttgtgtccggttctctactctcttcttttcatattcggcgttaccggtcaaggctatttgagcctcactagtcaagtctgtaataccggcattacgtttaaaattctcaagatttgcctctgtactcccaagctccttagaaataatattgatacgttcatctataaattcagcagtcttttgagcaatctcatttttatcattattcgtattacggttatacatttctaataattgattgataaaatcttgcccacgttgcaaactagagttcttcaatgaaatcacagctaccgaagtcgttttagaagtaggctcaatttttagattttcacaatacgcccgtgctactttcataggtgatttaatcttagccgtaatatgccgtatatttgaagacgcttccattgtatctttcttcaatgataaggaatctggcgattgaaaaaaggctaaagttccctcatccatcgggaatacagctggcaatttctcaaaatgcttttggtattctttatcaccaactgtaacatttacatccaaaccaccttctccatacaacgccatctcaacaaccataggatcagttagtttctcagcttcttgcggagtcaaactaactaaaacaggagaagttttatacatattctttgaaggaaatccatcttcatctatatatgatacatataagtttaacagattgattacttctttcactaaagtctttgaacgtaaaacttcaagttcattatctatattctgagaagaactaatcaagccacttaaccctaattcttccagtcctaccatacttcctgtattgccaccttttttgtcatcctttatcagaactgttgccgatatattataaacaggagtggccatacgcaaatatatccaagctccaataagacaaactaaaacggcaccgacaaaccacggccaatgaataatatatttaaaaagtaattgttgaatatctattttctcgtcctcagtttcacactgtctttcgtttactatttcttctttcattttttcaaaacgttattttaagatattaaataataagctggcaagagaaactaggatagatgtagcagagaaccatagactcgtactattcccaatatccgagttacgagcttttgccttattaggtgttacataaacgacatcattttgctgtagccaataatatggagaaagaattgtttctgatttattcaaatcaagagttataatttcttgcttacctgtggcatcttcacgaatcagttttacattatcccgcaagccatacaccgtcatatcccctgccatagcaagcgcctccaataaattgactttttcattagaaatagtaaaagtacccggacgagtgacttcacctatcactgaaattttataatttaccatacgcactgtaacgataggcgtttctttcatatagggtttcaacttttctacaatcatttgttctgcctgtttctttgtcaaaccacctagttttaactctcccaatacaggaaaaaaaatctttccttcattatctaccaagtaagtttgtaacacaggttgtgtagtagctaaaatattagtaacagacaaatttgttggactggcaactgtcaaattaaatggtgcagccaactccggactagtacaggaaactacgatagtcaacaaatctttaggcatgatctttgcatcatacaaattctctttctgttctatttgatttactacttctgtatcctgcaaataaggtactttcttgtaggactggcaggccgtaaacagaaaaggcagtaacactacaaaaatcaatttattcaatattctcataactgtgatgaattagatatctattcttttatactttgttgttttattactaattaatacgcttctttttctccatgaatagcattatatactgttttataaataatatacaaatcaagcataaacgtccaatgctcaatataccaaatatcacgactaacccgtccttccatttgccaaagttctttagtctctccacgatagcctgttacttgcgcccaaccagttataccaggcttcacaaaatgacgaaccataaatttattaatcacttgggcatattcctctgtatgtttcagcatatgggggcgaggaccaacaacagacatatcacccatcaatacattaataaactgaggcaattcatcaatactcgttttacgaataaactcacctatacgtgttttacgaggatcatttgctgtagcttgaagaacatcacattgtgcatttactcgcatagaacgaaatttgtaacaccaaaattcactaccgtcttcaccactacgtttctgtttaaaaaaaataggccccggcgagctgattttaatagcaatccctattattatataaacaaaagggaaaatagtacacaagaatatcaatgaaaatattatatcaaaaaatcgttttaaaacacgattctcacgaagttccaatggttcacgacgaatagataatactggtacattacctaataaatcaaaatacatcctgcgctttaaatagttacggacattgggaacactaaaaaaacgcaccaagtggttctcgcaataattaatgatcggaacaatctccgcactccgtgcagaaggaagactacagtagagttgtgcaattttacctgaatttctttctaaatactcaatcgcctctttcggctgtcccaaatatgcaacttcttccggataataatcggatggggaatcttcaaaatatcccattacacggtagcctgaagttggatcatctgtcattgaatggtaaagttcctgcatattctcgtgactgcccaccaatacaaccatgcgaacatttcctcctttttcacgataaagctccaaaaaataacgaaaagcaagacgataacaaatcaagatgatcagtaaagcaacataaaacaatccgaacaaccgagagcggaaaaattcaaaatggaaaagagacaaaaagcaaatggaaaataaaataaaaggaaccatattacgaagtacacgaatcataatctgttctggacgaacaactggatgatgcaaaataacccctgattgaatattgcaaaccagatagcatagactaagcaaaaccatcccttgataaagagaagttaaattaccagaataaaagcgactgcccaaaaccagttcaaatccccatagcaatgaattcaacaaaattatatcccccaaaaggacacaagattttaaaactttattaaaacgttggatctcctgcatagaacgatgttatataatagattttaatattatttctataaaaccacatttattcttctaataatattctagttttgagcaagcttgcattttagaacaaaagcttccaatcgaacatccatgtttcttaaagaaaacaaacatactctgtaaatgaagaagcgcctttcgaccgattttagaacttccacgaagatggttatgagtcattatagattcaggaaaataaacgacaggacgattacatttccaagatcgaagacaaatatcttcatcttccatatataaaaaataattctgatcaaacccgcctaaaaaagcataaaaatctctccgcataaataatgctgcgccaatagcccaatctacaggttgtatctttgttgtatccatgcttttacaaagatacttattcactatcttactggttgtttgatcattacctttagataaaaatcgagagaacagaacttttaatgtaataaaacttctcacagaatattgaactgtcccatctggattcaatagttttggtacagtaatgcctataataggatgcttttcaacatattcatatagaaaatctaaactccctttatgcaaaacaatatccggattaataatagcaatatatttccctattgaggctaatactcctttattattattttctccaaatcctaaaggtttttgattctcaacgatccttacttgaggataattttgtcggacatattcaactgtaccatctgatgaacaattatccacataaatcatttcaatacttgcttgaggaatattctctttatataaagaacgtaataatactttaaggtataaaagatggttcataccgaccgtaataatagaaatatcaatcatatttatcgaggattaacaaaggaaaattgaataaattaattccaaataatatatctattaaactaaatatatagactttcactatatgattgtagttatattaaatctggcagtaaagactaaacaataaactcacacatatcaacaataaatcactcaaatccttttaatatagtttgttatggaatccgattgatatgtcttaataaacatttctttcgttttaattctttcatctatattcaaattaagacattccatacatctaatataatcctttggcgtctcagcaatgagcataaaggaattaaataaaggaggaagaccttcaaaagcaatatcagttccaataacaggaatgccacatgccaaagcttctataaccttgactttaatacctgcccctgtaaacaatggggatatcaaagctttactctgagataaaatcttatatggatcatctacaaagccaagaatctctaaattcaaattcggaactatatttttcacatctttattaggaaatccacgtcctatgattttaatatgtactttttttctcaataatggacctacagtattaataaaccacaaagccccttccgcattttctttacgccgccaatcgccaaacattgtgaaataatcctcaactttatcgggacttttattaataatttgttcatcaatatagtctaaacaaagattagtttccttatgataaatctgttttattaggtcacaatctttttgtgaaaaagaaaaaatatgagcattaggcagattcaaggacatccgttccgagaaaatacatatcttctgtattaaatatgaagaagaacgaagcacacgttgtgcaattacatcatggcaaagtaatattttaggaatacgtttatcaatatatcgtccatacaagaacatattactatgattaaaaatcacaactttataatgattcattttaagcaaatccctaactcttcgaagtatcagccaattaaaacgtatagaaaaagtaggatgaacaaaaggaaagttgcaaacattttttaatttagtcattatcgagttacgaattgttagttttgtatttacatttcctctttcgggcacataatcattttcccaatcatatttaaaataaatcaaatcaacatcataacatgaagctaaatcattcagcattatcatagtgtttttttcacctgctgctgccttattgggaacatatgctgtcaaaaacaaaattttctctttcatataactttaattcctacaataccacaattcttagcaaattttatatcactatcactatcacctatcataaggcacttagctttatcaatatctggataatctctcaatatttgaagaaacatacctattcccggtttacggtcaatatcagaatccgtcaaagcggtacaataataaattctatctattctccctccatagttcttaacttcagaaatcattcgctcatgtatatgttttaaatcctcttcactcataatttccttccctactccacgctgattagtcactataaatatatatttaaaatgggtattccaagctttcaaaatttcaagtactccaggaagaaattcaaactcttcccattttttcacatagtcatctggacgaagtctgttaaccactccatcacgatctagcaacaatgtttcaaaaccagttacatcaatatcttgtagtctcattatagaaagaattatttagaaaaggagatctgaaaattccgcattggccttgtcgtaatcttcgggaataccaatatcaataaaatatccattttgcaccacaccataaagttttcctaataaacattggggttgaagaactcttgtctcaaaagaaaatctctgcgatagtctgtcgaatatcggttctaatgtattgataatatatataccaccattaatcaagcctttctcgcaatattttttctcatcaaatcttctaatctgattagtatcttcacatatctgtacatttccgtaacggtcaaagttttccattggctttaatgccagtgtgattgatgaaggatataaacaatgccattcatataattcattcaaatttacatcaaagaatgtatcgccattcaaaacaataatattaggtttactagttctctttaaggctagttttattcctccacctgtccctaatggttcgtcctccacggcatattcgaaagcaaaaggaaactcatctttacactcatcaatccaatcaataataacaccgcgtaaataacccaaagatagaattacttttgatacatcaaattttgtaagatatttcagtaaataccacaaaaaaggtttgtttgctattggcgccatacacttgggtacttcatttactacactacgcaaacgagtcccaaatccaccagctaatatgataacttccataaaattatttattatattcttccccaaaaatattctcttccacaatacagcaaataatatgtcctatcaatgtttgacattcctgtatacgaggggtttcagcactaggaactttaatgacaatatcaaaatcatccattttacaagacttcatacctgtaagagcaatcgtcgtaatccccttttctttacatataggcaaggcatctacaatatttttcgaattacctgaagtagaaataccaataaaaacatctcctgccacaccttgtgcctggagttggcgtgtaaatattttatcatatccataatcattaccaatagctgtaataacactggtatccgtagttaaagctattgaaggaattcccggacgatcaaaataaaacttactcacaaattcgccgactaaatgctgagcatcagctgcactccccccattacccgcaaacatcgttttatttcctcgacgataggcctcagtacatacgtcagccgctttagcaatagccgctatcacttcttcatttttagaaagttccgctttcactcgctcactctccgctacttgttttcttacaatatcaatactttccatacttatgctatatctatttctgaactttatctgttgaataaatcttccatccgtgtgcaccgtcatcaataaactgaaatggcataacaaaaccattcaaattatttaaagcccgtaccacttcttctttacgtgtcggctcaaccacaaacatgataaatcctcccccacctgctccactaaccttaccggccatagcaccggcaccagtggctacatcaaaagcttcttgaatcatcggattagtaatggcgccagccatcttcttcttattttcccatccttcacccaaaatacgagcaaactccccaacatcccccttcaacaaggctaatttagtatcaatagcactctgtttaatcttatgcatcgcctctatagcggtttgattaccttcgcttgtatttttcttctgctcattaataatagcagcagaagagcgagaacgacctgtaaaatatagaaccatacttgactctaattcatccacaatccaacgtttcatttttagcggattaacaatcaccaaatcattttgcaagaattccatataattgaatcccccaaaagctgctgcatattgatcttgcttaccaccactcaatcccaaatccttacgttcaatttcataagctagacgcgacgtctcgtaatctcctaaaggaagtgacaaccactcaataaaagcctttaatatacaaacaaccatagtagaggatgttcctaatcctgatccagcaggcgcatcattataagttgttattttgaatgacttaggctcaagcctataatcacgaataatacggttatacacaccttttatgagacttgcttctccatcaatctctaattgagacatagaaaggtaacttttgcaacattgtgcatcataagcattaatctcaatcctaccgctgttggtctcttcaatagtacaataagcatataaattaattgttgcattgagaatcaaccctccataaatatcactataaggtgatacatcacttccaccaccagccaatcccagacgtaatggcgctttacttcttacaatcattttattgaaatatataaattattcatatagtcaaaaatatagaatatcctttactcttttagctagctgaatgaaacgatatgtccaattaatgataaatgcatcattgaaggaaataatattttttccaactgccttatctaataagaggcgtatttgagattttgagattgcttgagaataatgtaccactaaacgaaaaaaagcatactttgtaaatcggtagacagatgatttatgaaagaactcatttatccaatgagtaaactcaatatcagcagtaagctttcggagcaccattttattatccatattaggtgttatattttttttgctcttacgccaatatacataatctccagaaatagttttaatacctttatcagctcctattttcacccatgtagctatatcacttccccatgctaaatcaaagtgctgaaaaccacctgtacaattataaatatcccttagaaaaatatactctactacaaaactatctaaccgagccgacgctttccgacgataaaaagtctcactatctatcaccgatggataaacagttggaattctcactatctgattttcgcaatcaacaatcttaacatcaaaatgataaatgtcaaaagctccattatctattgctattgtattaaaaaaacattctacacaacgaggccccataatatcatcatcagaaaacagccacagccaaggctcattctgtgtcagttgtatacaacggttccattgtgcaacgagatcatgcccaccaaaattcacttcaaatcttctataaacaatatccaattgcttcgaatattgttctataagactcttaaaatcatctctactacaatcctcaccaatataaacagtgaaatctttacatgtctgttgcgctaaagagaataatacagtctcaaagaagtctaccttataggcaggtattacaattgccaattttttcattaatcaactttatagaaaatgaagatatgtccctcccaaagtataccgcaaatcaatagaacgttgcgccaaaacttttgctggtattcctccacatatagtaaaaggcggaatatccttagtaactacggcaccagctgctatcactgctccctctccaatagtaacactatgcaaaattgttacattagggccaatccatacacggttctttatataaataggaccacgattcgttttcatagatcgaaagtatggatcattataatcatgaccacctgtccaaagagaaacattagaagcaatattaacgttttcaccgatatagattcctccacgcctcgcatccagaatactattatctccaacgacagagccttttcctatcatcaacatccatggtgcacgaatttcacttccataatataatactgaattcttttccatttttaccaagaaaatatacttgtaaaagaaatcacgtatatgatgtgaaggaatatccgaaattattttgatcatccaacgaaaataaccatccacaatattgatcaatcctcttttatctattcgtttgaacaattttttagaacaagaagaagaagtaatgccagaatccctaatttcactcacctcaccttcaggattagccatgtttttgcgacgatgcagccaacaataagccattagtaaaggagaagtaaatagcagtaaccaatacttaataaatacaactattagtataaacagaacaaccgataaattcataatctcattatcgtttcaacatttcattataaatattcaggcgccgctgtacagaagcttccggtgaatacatctccattagtttctcatgagcagcttttgtcagattatgttgtaaaaccttatctgttgctatttttaaaacaccagtagcaaaagcttgaggctcatcagctatgatacactcttttccatttataaaatcaagtccttctacacctactgtggtagtaacgaaaggcgaatagaaattgaccgattctaatattttcatacgaataccgctacctattaaaataggtattaccataatacattcagatataaccatagccaagttatctacaaagccacaaaaaaacaaatttctatacttcttctgatattctgttttaattttctcatcccattttcctataattttaaaagtaaaattgggattttctttgagtatcaaagaccaaacattatctaagaaccaagtaactccatttaagtttgggttatgaccagaaccaccaataaaacagatactactccgttcacattccttatatgctatattatcaggtaaaggaataaaagaaggagaagctgaaataggtgctcttaccccatcacacatcaggatattcttatcaatatcagtcattgttattacttggtcgtattcatttaacgcattaatttcctgtatccgttgcatcgtggctaaatagcgtacgctagaaggatattcacgctgctgaaacagacgttccttagcaatgtattgaatttcatgttgaatgaacaccttctttacagtattaggaatagcataaaccatatatagctgttcaaaatattcattttgaacaatatcaatccgatctttttttataatttcatttacaaaatcaatataagcatctttatatataggtgtagccaaatatggctgtttcaaaaatttccgggttataatacggtgcagacgaaataatgagtattgcgacttgatgccatctttatttttataatattcaaaagggtaaactttaacctttggtaattgtttttccaacaaatattgacaggccatttgtttcttaaagaatacaggatagatcaaagttatatctatcatattctgcaactccattaacatattaaacgacccctgctttcctccgtctgtagcaggataaggcatccatggcaatgtaataagatatctcataaaacattatttagacttaaaaacttccaaaatagaactcatcatttgctcatagttattataataattcaaagctgttttttgacatgctattacatcaaaatgtaatatttgattaatcacaatatcaacaggtggacatttccaaaagcgagaatacgcattgatacgattatcaagtaaagaaaaacgtgacataatatcataaattttactcgattcttcgacacatacacaacgtgcatatttaagtacaccataggtatcaaaacaaaaacatggtactgcattatgtagagccacaacaataggatgcatattttccccaatatatcctttagcatattttatcaaggcataccaatctaatggaggtagcggagtagtaatagaaaaatcaaaattatgcttaaactcaataccagtcggcataggaagagcaacacattctaaatatagctttttcatttctgattttaatttatccatccatagcatattatcaagcattctacatttcatgcttacaagaacataattttcaggcaaatgatattttaaaagaatatcttcttttgaaggaatgaatttagcacaattataattaaaggcaaatactggatcgggagttatatttggtattattgccccttttgttatataagtaatcatatcacgagtccatatatctcgaaccgaaatatattcgaagtgagacaaattattactcattttatgctttaccgaacgcgctatcaatctatatttcgcattctgtgatgatgcagacataattaccattggaattttagacccaagtttatcataaaatgtaccccaaaaagcattaggatactcacgttcagatgtagctttattaacacgtacaactgttttggttggaaaatccaatctaccccaaaaagacgaacactgaagaactgcatcactgccaataattataccttctattttttcatcctttatcacttgacaaatatcatcatcattacgacatattttggtctgcggaaaatatttctctacaaaatgaaaatgctcttgtggttgcttctgagttttaatacttgtgaaacgagcttcaaaatcttctggctcccacttaatcaaaataggattatatccgtgattctgtagatagcttatcgtagatagtgcttgtaaattagccccaaaattagggacattagcaaatgttagaattccgatcttcattatttattaatatattttcttgtccgatacttactaaataaaaagcagaaaaaaagagtaaacaaaatttcaagattcccccaatccccttgaagaacaaagaaaaaaacaccattgatcagtgtgtaggctaacattcccaaagctatgaacttaggcagtgtcagtatattgtaaggtcgcattttctttaccataaaaaacgataaaagcaaaccaataacaatagtgccaacaaaaccaaactcaatattcagaccgcctacaaatgtatagaatacatgggtgtcaacacctgtaatattatcaagccactcccatttttcacgtgttgttttaaaatttgaggaaattcccataagcttacgaaaaaaaacaaaatatgcctctccccatgtattaccttttaactcatagaaaaaatgtgtattataattattaaaagactctcctaaataccgataaaacatataagtggcaagattaccaaaacgagagttggatataagaataaaggctgaagaaataggaactaagattaagattaaataagatacaatcttttttttcaatcctacattcataaaaacagatagaaacacaaaaataaaaactaaaaagaaaaatgtcattatcattacggctctacttgcatatgctgtaaacatatatacaggaaaacataaagaagtgacgagaaatatcttaagaagttttctatgtgtttttatgacaagtaaaccgtaagcggcaatcaaaataacaacattgcgtgcgcccatatatagacgacataatatgttaaaaaaataatttggaaattgtacaatctcagattcatcatatgtatcattacgataatcaccaatatttgaagaaagtattgcttttaaaaatgaaggaaataaaataatatataacactatctgaataaaaagaagtatccaaaccaaatttatgaagaagttagaatttaacgtttcaattcgagtgattctagtattatcatatctgataataggatatgcaaaaagaagaataacaggtataagatataaaaatggtataattgaatacgtctccctcccccgcatataatgaaacaactcgtgctcatgatacagtaatgctccccatgcacaaatcgaataatatgccaatatatagaaagcgatatttaacttcctatttttccaatagtggtaaactgctaatatagaaaagacagcagcgttaaatatcaatatttgtaattctgacatttatttgattttttgttcacccataaatagcttggctattattggagttttcttaatactcttttaacaatttgtttcactatttttttagtgataacatatttgctatcaccaaaatacttcttatatgcagcatcaaaccctcttaaaagataaaattcccaaaactcttgtcgtctttgattagaacatgtagggcgaattaagcatggctgcatagcttcatctttcgttatcttccacaaatcaatagaatcgtaaagtttatttaccaagcctaaccccatattagtattcaccattaataatgaagtaccttcacatgaatacaaatccgggcgattcttcttgtcgtcccaaaaatcagctattgtaaaatctccaggacggtccaagttagaatacttacaagagtgacaagaaggacgatttatcatttgagaaaaaaatatttttccccaattaactacccaaacaggatcgacagctttctggccgttttcaaaataaaaacaataagagaagcgatgactccacccataagtttgtttgtacctcatgttgatagacatgaccttttggccaagtttcgtcgagcacatatttatatattgcttatatataagtggactaggaacagcatggcaaactaaatcaaccgttagtaaattctcatatggtttacgtaaaaaaagcttaagcccttctacttgacaaggagaacctgtaaacaaaacccagcgatcgctttttaaataagtctttatctgattgtaaacaccttgaatttcactctggacatattttgaccccataaaactccctataccttccatcgtttccgaaaagctatgtctcactactccatcgttatcatattctacaccacaaacaacccctcccaattctattacagatcctgcaatagctgtaaaagcaccaccactagaactgttccgtaacgttacaatatttttatggcgagctgcaaaatatgcttttggagttggccttatatccttcacctttctataaagaataggacaagccatctcacaaagtccacaattgatgcatttaccttcctcaatcataggatatttaaaaccttccacatcttccttaaaaactatcgcattatgattgcagattgacaagcatgcagaacatccacaacaatcctctgatttttttatttttatcatgatcctcaacagcttatttgatatgattacaagttattttttataagcttacgcacttgaccaacgacaaatactctttcacttgctttgcaacccacaaaaaagatagccataaatgagcatatgatacatgagaaagataagatcaagaacgaataaaatgatgattgtaatcgtaatgagattaaatagggaattgcaactgaaaatatcgtcacagcacatatattaaagaaaacattcttcatatagcttttaacaggcaattgtatcatactacgaagcataaataaacgaagtgccaaacaacataatgatataccaatagccacataaagagtaatttctggtgcataacctcgttctaacaatatatatgaaataggaaaattcatcatttgcataccgcctacaactatttggtaatttctaatactgcctgttgctagcatcgcagtaatcaaaggatttgatattgattcacacatggcaaagatcaagattaaacggacaaatatgattgtataatcaggaacattttttaaccatattgataatatatattctgtactcatgagtactggtaatgacaaaaatagtaacatataaaaagataatcttgccccctgaaaaatcaaagtaaacatgtatttactatcacctacagcaaatgattttgttatctgtggatttaatgctgtcataaagttttgagcgaaactattaattgcataattaacctgtacagccatccctcttgcagcattgacagttggaccacaaaaaagatttatagcaatatttacgccttggtctctaaggattgctgaagatgcccctataaaattccaacccgaaaagctcaacattcttttcaataggaatctatcgattcgacaaaaacatttacattccttaaaatgtcgcctacaatatataaaataagcgaaggttataacaattgctaccaccaacaacaaagccccataaacaatcaatttatctactgacattaatactaataaataaacaattaagagtttaagtgacacctccagaatactaacataagcaaatgcagacattcgttcgtgtgcaataattaaagcattaaagggaatacaaatcaaattgactccaaaggtaaaaattgagaactgaagcacccaatttgccgcattcatacgaacttcgggtatattcattttattattaagaaaccacactcctataagctcagcaagtataacgaccactaaagccattaaaaactgtataactactgctgtagaaaataccgtcttcagtcttcgtagatcacctttacccaactcaatagttataaagcgactaatggcagaagacaatgaggtagatataatagcaaacatagttactactccccctaccacattataaataccaaaatcttcaacccccaacgtagctagtaccacacggctagtatacaatgataccatcatggtaaataacatacggaaatagagaagaaaagtattcttagctattcgcttattattgtaattagtagttatcaaatataaaacaattattcagtaaatatccggaacttcgtatccaactccaactttagatgtttacaacatcaaaagctatttttcatattaatactttaattattatgggaataaaaaggctctatataaaagagaatattcattcattcctatatatggaatcgtaatactcctgataatcaccacttgtcacattgtccatccatacctcattatctaaataccatctcacagtcctttcgagaccttcttcaaactgcaaactcggctcccagcctaactcttgtttcagcttagcggagtcaattgcatagcgtagatcgtgtccctttcgatcagaaacatatgtaattaaatctaaggaataaccttcggaataacctagtaacctatcaacagttttaataataaccttaataatatctatgttcttccattcattgaacccaccaatattatatgtctctgctattttacctttgtgaaaaataagatcaatgccccgaacatggtcgattacatacaaccaatcacgaacattttctcctttgccatacacgggcaatggtttacgacagcgaatattattgatgaataatggtataagtttttcaggaaattggtaagggccataattattggaacaattcgttacaattgtaggcatattataagtgtcgtgaaaagcacgtacaaaatgatcactacttgctttagaagcagaatacggactgtgtggactatacctcgtggtttccttaaaaaaatcatgaccataaggtcccctaccgtccttattgccactaggattcgttaaatccaatgcaccataaacttcatctgtagatatatgataaaaacgcttgccttcataaccttcagaaagagactcccaagttaatttagccgcttgaagcagagaaagggttcccattacattcgtacgagcaaaagtaaaaggatcattaatactacgatctacatgactttcagctgccaagtgaataaccccatctatcttatactcactaaacaactctatcattttttcaaaatcacagatatcagcttttacaaaaacataattaggtttatcttcaatatctttcagattagccaagtttccagcataagtcagtttatctaagttgataatacgatagccgggatatttattcacaaacagacggacaacatgactaccaatgaaaccagcgccaccagtgatcattatatttcttgagaatttcatgattaattattttctttaagttcattaatacatttcacaagagaatctttccaataaggaatctcgacaccaaaagccagcttcaattttgttttatctaatactgagaaatgaggacgttttactttactaggaaattcatcactatgacaaggttgaatatcacaactgtttccactcaattcacagatttctttagcaaaatcataccatgaacaaacaccctcattactgaaatgatagataccttgtttgtgatattgatccccctcaatcactctataaataatatcagccaaatcttttgcatatgtaggtgtaccaatctgatcaaaaacaactctcaatttatctttatcagcggttaactgtcgcatagttttaacaaaattcttaccaaattgagaatacagccaagctgtacgaaaaatcaaataattacagcctacacgttggatgctttgttctcctgctctttttgttttgccataaatacctaaaggattagtttcacagtcttctccacatggcatattcttatcaccttgaaatacataatcagtcgaaatatgaattaaagtagcattaacttcttttgcagcaatagccagattctctacagctttattattcaataagtctgccatatcataatcatcttctgctttatctacattcgtataagcagcacagttaacaattacctttatattatccaaatgtatcatattacgaatagcatctaaatctgttatatccaactctgcaacatcagtaaatatataattattcaaacttgtagctgctatgcatcgcatttcattaccaagctgaccattagctccagttactagaatattcattatttaatatagactttcattatagttaaacaaccaagaagcatctttcaataattcatgatgattatccttctcagacaatacaatctcatttgccggaactctccaatcaatacccaaatcaggatcatcccatgccaaagacccttcactttgcggagcatagaaattatcacatttatattgaaaaataacttcatccgtcagcacactgaatccatgagcaaaaccacgaggaataaaaaattgacgatgattatcttctgtcagttctacagatacatacttcccaaacgttggtgagcctttgcgaatatctaccgcaacatccaaaacggcgcctttaatgacacgaactaatttactttgtgcatagggaggcttctgaaaatgtaaacctcgtagcaccccataactagacttactctcattatcttgtacaaaattcactttacgaactttctcgttaaattcccgttgcgagaaagattcgaagaaatagccacgatcatccttaaacaaacgaggttcaataatgaacacaccttctatagctgttttaataacttccactgtgattcttttgaaaattaagtattaaatttatttctgtgttagctcatcaattacctttagcaagtattgcccatactgattcttcagcataggcttggccagctcacgcatcttatcagcagtaatccatccatgacgtaaggcaataccttccaagcatgctaccttcaagccttgacgtttctcaataacttcaataaaagtactggcttcggataaagaatcatgggttcctgtatccagccaagcgaatccacgacctagcagctgcactttaagttcctgatcattcaggaattgctgattcactgtcgtaatctctaattcaccacgcgaagatggtgtgatatttttagctacttccaccactttattaggatagaaataaagaccgactactgcataattagattttggctgaataggtttttcttctatactcagaacactccccattttatcaaattcagcaacaccataacgttcaggatcggcaacccagtatccaaaaacagtagctttattctcttcttctgcagtatacacagcttcttgcagcatacgggtgaaaccctgaccatagaaaatattatcacctagtaccagacaaacagaatcgttaccgataaattcttctccgataataaatgcttgagccaatccatccggagaaggttgctctgcatattcaaaacgtacaccataatcagagccatctcctaaaagacgtttaaagcccggaagatcataaggagtagaaattatcagaatctcacgtataccagccaacatcaataccgaaataggataataaatcattggcttatcaaagatagggagcagttgtttgctcactccttttgtgatcggatacaaacgagtacctgaaccaccggctaaaacaattcctttcattgatttgttattagtactcaagatttgagtggcagggtatatatccttccactcaaaaaattgaatattttattaaaaaaatagattaccttccgagattaaaaaaaaatagttctaaaggtcagacatgaagtgtccgacaacaaggtgttgagcagatgatcgtaatgttatgattagttgattttttcgcaataccacttgggaatatgtagcatgacgccgatagtagctaacgtaacaactacgtaatagctcttcttgtattgcgtgagtttgccttcaagtccggcaaacgggccacggatcacccgaactgcttgtccgggacgggcttctgctgttactgtatcgacataaagagttcctttataattaggatcgcatacggcacggaattccaacatctcacagtctggaatctcataacaccgccgtgtactccggtcacgaacaagcaaaaaaggtatagtacaatcttttaccctttctaaaagttctttttccgtaaattctttctcgataaacagcagattgtgtacagctggagtcagtttccgatgctttttaccatcaagcgtctcatgctcgatatatcgcatcggaataaaataatttaccccttttttttccaaatatttccccaaatgttcttctttacaatagaaggtttgtacagcataccatgccttccttccctctgtttgtcgttctttgtccaaatcattcattatcacccattaccccttgttttttatttcatcacttacttaaaagacaaaagcgccctgactttcacaaatgaaatccatttatgaagcagtagcgcatctcttaaggatttagcctttttatcttatctccatataagaaccaaggttcatagagaaacggatacagtactaaaacgatgcaaaagtaatacaatttaataaaagaacatacttttacagcttttattttgcctgcaaagatgttaaactcctgtctgcttaaacaaaaatccctctaagtgtgtcgcaatgaaacacttagaggaattacatatattacaacgatatttcttacttcttagcttcctgacggctttcaatgatcaaggttccttttttcaagcctttgcccgtagcttcaagggttattttgcccggttgctctgtcgaagatacaatagcagtcatcataccactgaagactttcatcttcggacgctggaaagattccaaggaagctgcattaccattagctcctgcacggtaactaccctcccccttcactttgaaactgatttcatgtgaggcatccggacacagattaccgtctttgtctaccactcgcactgttacaaaagaaagatcttttccatccgctttgattacattacgatcggctaccaattcaatatgatccggtttaccggctgtatggagttctttttcagctacagctttcccgtcagcatcataagccacgactttcaccgtgcctggctcatattttgtatccatccacatcaggcggtaacggctctgacgtttcaagttcatgatggaaacagagtcagcactattatcaatggttacggaaaggtctttggtacgtttcccctggctctttccgttgatgaataattcggctgaaggatagttggtatacacaaagacaggagttatctctccctctcgtccttcccaattccagtgaggaagaatgtgaagtgtttcctgttctttattccagtgactacgatagagataataacggtctttgggcagccctgctaaatcgataattccaaacagtgaagaatgactgggccaatctgtataatagggagtcggttcacccagataatcgaatcctgtccaaacaaactctcctatacaataaggcaagtcctcatgttgaataaaatcatcttcaggcagattggaccatgaacaagactccacatcataagaggaagactggtgatcgtcatatttcttcatccattggcgggtaacagggaatttatatactccacgggaactaaccgtagaagcagtctcactacccaagactatctgttgaggaagttttttataattctcctgatatttatgtggtctataattaaatcccgcaatatccattactgccgccatattattattgactacagcatccggcgcatccatcccctgtgtgacaggacgtgtcggatcttcacgatgacaaagttcctgtagaaaataagacatcttaggtcctttatttccatcccattgttcgggaacctcatttccgatgcaccacatcaccacactcggattattacgataatgacgtagcaagttcgtcagatcctttactgcccattcgtcaaagacatgacgatagccgttcttaactttcatagccttccattcatcaaacgattccgccatcaccatcattcccatctcatcacaagctctgattaactcaggagcaggcatattatgagaagtacgaatcgcattacaacccatatctttcaaaatacgaatctgacgacggatagcagcatcattcacagcacctcccaaaggaccgaggtcatgatgattgcatacgcctttgaatggagttctctttccatttaagaaaaagcccttattgggaatgacttcaatagtacgaataccgaaagatgttgtatattcatccttcagtgtattaccttcatagactttagaaacagcctgataaagaacaggtgtttccgggctccataaagccggacgactgacaacaagttcctgactgaagatattatcatcaaaacgggaaccttgtttctcatcagtagttactacttttccatccttatctttaagttcagtcactatacggtatgcatcaaactgttttccggaaggtacgaccaaagtcgtttttatattcactttcgcataatcatccttcactaccggagtagtcaactgtgtaccccatgtcggaatatgagcatcttccgttactaccagatgtacatttctgtaaagtccggctcccggataccaacgggaagattctgtctcattctccagacgaacagctaaagtattctttgtcccctctttcagatagggagttacatccagataaaaggtattgtacccatagggccaataacccgcctcctgaccgttgacatacacacgagcatggctcatagctccgtcaaagatcaatgtagcctttttccctttggcaaaagagggagcatcaaaattcagccgataccagcccactccgacgaaaggaagaccacctgtacgtccggcatgttccatcgcttctttttgtccgtcttgtgcaatggctgtcatttgcctatcattatctacaccaaaaggcccataaatagcccagtcatggggtactaccactgattgccacttgatatcattatagtcgggctgaataaaatcagcattatcttcacgtgtaaatttccatcctttctcaaaggtatacgaggttcgtacctgtgcactgatcacagagaaagaaaaaaggacggctattcctaataagtatctaatatttagagtcataaattatacatctgattatttcactactatttcatccgtaaatatccatccaccgaattcttctccggcacgagcttgataacgtatataccgtccttcagcactgccttcccatgaaatactaataaatttaatagcttcttttctatttacttcaaaagtatattgtttcaattctgtgaagtttgttccatcatcagaaatggaaatagtgacagattcaggcaaaaagacctctgcccctaccacttgcataaaatcagcagagacagaatggacaacagtttccgtacccatatcaatggtaacatccaatcgctttttatcgataaaaccttgccaggaaccatctccataagtccagtcgccacgaataccatcagtaagagctgtatttccctgcgcaggatagtgaggactatacggagcattataaataaccttcttccccacagccagatgacttatcggcttcaaagactccggacgacttcctatctcatttttaagatcaaaagtatgatatcctttcgcttgcaaatcatcaactgctttcaatgcacgattatgaaagtctgtccatgatttacgttcgggagccgaccaagccacttctgccaaagcaaggatacgaggatatatcatatattccatatgctccggagtggggatatattctgcccatagatttgcctgcacaccataaacaagttttgcctgttctacagttaaagaatctgaaaccggattatatgaataaaccttctccaatggcaaatatcctccgatagcttccggctgagaatacggagcatcctgataactatccaaataacaatattgaccgggagtcataactgcctgatgaccggaacggacagcagcaatacctccctcttcgccacgccatgacattacagtagcattaggagccagaccaccttgaagaatttcatcccaacccagcaacttacgtccatgtgcattcagaaacagttcaatacgatgaatcagatagctttgtagctcgtctacattagaaagatgttcatcctgcatccttttctgacatttcggacaagtcttccaagccgccttaccagcctcatcgcctcctacatgaatatattccgatggaaaaagctccattacttcagtaagcacattttctaagaaagtgaatgtttcttcatttccaacacaaaaatctgcgtttttataaggttcacccgaacaggagagttgcggataagcagccaatacttcttctgaatgggcaggcatctcgatttcaggaatgattgtgatataatgctgctgcgcatatgcaataatctccttcatgtcatcctgagtataataaccaccggaagcaccgggctcatcaaaacgaagatatttccgtccgccattccaccacttcttccagtttgcatctgtacgccaggctgcaaattccgtcaataaaggatatttctttatttcaagtctccatcctgccgcatccgtcaaatgcaagtgcaaacggtttagtttataaaatgccaatgcgtctatctgtttcttcacaaattctttagagaagaagtggcgggagacatccagcatcataccacgataagcaaaacgaggggtatcctgtacttcaacagaagctatagaatagcccgtgtccgaaggctgagataactgcaacaatgtctgaattccataaaacaacccagcaccggaagaagcctgaatcagaatatgttcaggagtaacggataatatataactttccggtgacaccaactgaggcttcttttctgttatcaataaagacaagacattctgtttatctttctttttcccttccttaaattgtacaggtaatgcagttttcagatagttacccagaagaatagcttcttctccctgtagatttgtataaagctttgttttttcagagagtaaaaaagagcccgtaccctgttccatctttaagggaacaggaattacggactgtgcatttatgggatgtgtacaaagacacatcccgattacccataagaaaagacaaactttagtgtatctctttcttatattcattaattaattgtgatttcgtctacaaataaaaagcctggataactcttaccaccatgccattccggaatacttttctcgggtgaagctataactttcacatattgtgcagttacaggtgtaaatgttagtttatggtcataaacaccatttttatcagtttccttcattgcaggataagtttcagatgccactttcgtgaagtttgtgccgtcttctgaaacttctacagagagtcctcttgtatcaaaaacccaatctcccttctctacgcaagtagaaatggcaacgcttgaaatctctgttggttgtttgaaatcaatagtcacatccatatcatttcctctaaatgcaatccagcgtccggttttatagttaccatttcctttcaagccatctaccaacgtagagacacctttgaactcatattgtttattcaccggctgattagcaacaatcggcttcatgcttgatttactgaaatcgattttctcagaaacgacacgactattgccagtagggcgaatagctatagccgagaagtctgcattttccttaatcttcaaagcaccatcataaacgggagaagtactcgtcggctctgtaccatctagcgtgtagtggattggtgcattatcaattgtagtaagtgtaatgtctaaagtaccatcagccggattcggagtaaattctgcttttacatcaaatacgtgctttgcataattatatccttctgcatcataccacttaatcagtcgtggaagacgagacaagaaatcttcgtagttcttcttatcaggtgttgaccactggacttcacacaaagcagcccaacgaggcaagaccatatattgagcatgagagaaagtagcaatatactctgtccaaagattggcttgtacaccttttatatactgctgttcttccggagtaagggaagccggcatcggctcatagctgtacactctttccatcggcaaataacctccgataccgaaaggttcattttcagtatctttagcctgataataatcaaaatacagataagtgttcggggtcatgatcacatcatgtttctgcttggcagcttcaatacctccactttcgccacgccatgacataactgttgcattaggagcaagtccgccttcgagaatctcatcccaaccaataatctgacgtccgtgatcgttcaggaacttctctatatgattgataacaaaactctgcaaacgttcttccttagtatgattcttatccgatttcaagcccaacgctttgatacgtgcctgacatttcggacatttctcccatcttaccttcggacattcgtcaccacctacatggatatactctgaagggaagatttcaatcaattcaccatatacatcttccaggaatttcagaacctgatcgttgccagcacaaagtacatcatcggccactccccattgtctccaaacttcatacggtccaccggtacaacccaattccggataagcggcaagggcagccagcatgtgtcccggaaggtcgatctcaggaacaacagtgatataacgttctgcggcataatctacaatttccttagcctgttcctgtgtataaaatccaccatagggtgtgttatcatattcaccggagttacgtccgatgaccgttcccgatctttgagaacctatttccgtcaacttcggatatttcttgatttccagacgccatccctggtcgtcagtaatatgccagtgcaaacggttcatgttatgcaaagccagcatatcaatataagtcttcacttcatcaattgtgaagaaatgacggctaacatcgaaatgtgcaccacgataaccgaaacgaggagcatccttgatttcaacagcaggcaatgctacatcagcacccaaagcaataggcaatgatttacgcaaagtctgaataccatagaaaactccggcttctgtaggggcagttatcgtgacaccttgatcggttactttcaactgataagattcagggttttctacttctgagcctaacgccagcactatagcatttttaccttcagttccggcttcaatcgaaaagtcttttccggttgcagtcttcagataatcagccaaaaattgcgcattacgctgcatcttctcatttccttccggataaaggattttcacaccgcttttcaaaataaaggggtttacttgcgatgttacaatttcttgtggcaatgggataatctgataattggcttcttcttgtaccgagccacaagagctcatcagtcctgccaatgccacacatcctgttaattttaggagttgtttcataaaataaaaattaggtgttagtagttaataaattagttttatttataggtttctcgaatatgcttgatattgacaggtaactcttctcccttctttatccggggagaagtaataattactttcttacgttctccgggtaagagatcaaagaagttgtcactgtaacgggctccctgcaatggagtctcaataaaaagatcttttgccaacattgatgaaaagagagtcaattcacatttaccatccgtctgcttcatttgataggatactgatgctggaggaagttgcaaatctttcgtctttctgaaaaaatggacgctctcagccacctgatgtcctgatttatctttgagtatcaatttcaagaagctacgtcgacagtcttcgggagtcagccagccatccagttttgcacgataaacacattttgaagtatttgccggagcttccaacgaatgtacctgtatcttcttacccagcgtttttccatcaaaatccacgactttcatttccaatgtcatttgctccattgcatcaagccgatctgaaattagaaaaacactcaaactgtcattctgctgtataggattgatcaagatcggtgtaaaagcacgctttgcctgataatgtaatgccttccaattaccataataatcaatacttgaccaggataccaccggccaactgtcgttcaactgccaatacaatgtccccatacaataaggacgattgcgtctgtgagcttccagtccatgccgcatcccctgtccttgcaagactaatccgacatacacaaaatcctcgaaactttcgggaatgatataatcacgttccatataagtacggatcaatgaatttccaatactactcttctgatgcgcattcatcacttcagactcaatctgataatcttcaggagcagcaaaagcagcaatggttttcatttccggaaatgactggaaaccaaattcactcataaaacgcggcaaatcggtatctaaagactcaaatggcttctttccgtaccagactccccaattatgactgtctcctatcccccatgattccggacgcccccagttagcgagatagggcgaactgtgcacataaaaacgatccgaatcaaattctttaaccattgaaggcaacagctcacggaacagtttatcataaccatgcattaatccttgataaacctccggagtaaatttcttctcaaagccccaatatttcagagcttccagtatttcattattaccacaccacatcgccaaagaggcatgattccgaagacggcgaatattgtaaacagcctccgcctctacccgtttcaggaaagtaggatcggatggataaggggtacacgcaaacataaaatcctgccagacaagtatcccgttctcatcggcaaggtcatagaaaagattattctcatatgtcccgccaccccatatacgaaccatattcatattggcttccttcatgtcacggaacaaagtctgatagcgttccgtagtaacattaggcaacagtgcatcctgaggaatataattagctcctttggcaaacatcggtatgccattgacttcaaaataaaaagattctccgtccttatctttttcatttaccacacgaatcgttcgtaaaccaatccgatgagattgttccgcaacaatccgatctccacaagctatctgagccgagaaatcatacagagtcggagttccccaaccattgggcatccatcgtacaggattcgtcacgtcagtaggaagagtgatatgatttatcccgggttgcagtgtcacctgctgttttacttctgtaatggtagttccattcaacgatacattgacccttacttcagccggagttttctgaggaacaatctgattaacaataagttcattagacagacgagcgttttcatctgtcagcgataattgtctgacatggtagtcggatatggtagctatgtcgtaaaaacgaagagtaaccgggcgccagacaccacttgtcaccattcggatgccccagtcccaaccgtaactatacggagccttacggctgaacacactaagatgtttctcgtgatgatcgttatccgctggataattgaagccattggaagcatattgcggcaacgtttgccggataggtgaatggaaataaatatataagtgattctcgcccttccgcaacacagattttacaggaagtgtataccccacaaacatattatcagccttcagcaataatgagccgttgagatatacgtctgcataggtatcgagaccttcgaaaataagttggattccgtcacgattcaattgctcttcggaaactataaaggaggttctatattcccagtcctcattctccacccattgaattttcttttcattcatcccataaaagggattcggcagtaattcatgactgatcaggtcctgatgaaccgtaccaggaaccgtggctggcatccacttttcagtccctgactgagaaaattcccaaccggtatccagtagtatgacttccgaagtgtcattaccctgagcataaaccatactacagcaacatagcaatccacatgctatcggggctatctttcctgtcaaatttaagatcatagtgggggcattagatattaacggagtaaagatattgcttttttgttaaatatttcctattgaagccacaaaatatctcatttcatcgaaaattcggcacgaaatgtcgaagcaggcagtccttcccgattgatcagattagcccgcgtaaaaggttgccagccatatcgtacatagcggggattttgcacttctttactatacaccttcacctgttctcctacaacctcagccgttgccggataatagataccatcatattccgctacttcaaagcattgtaagggctttccgtccgagctccgcatcccttttccataatcaaaagacaaaaagactttcccaccgcgaacgtttgcaccacgaaataaaggaccggaaggaatgacatttttctgatacgttttattcaaagcccatcgcgccaaacgctctcccacgggtttcttacaggtaggatgcacatccagagaatcaccatgatcgctggatacagccattccgatatgagaaatttcattcaacattctacgctgactatcacggaaccaaggccaagaagggcgattcaaactggataattgtacataataaaaaggcaggcaggcatcattccaattctttcgccaactattcacgagcagtttaaataatttttcatgggcttcccaattatgcgcattcgattctccctgataccagattactcctcgtatcggatactgttccaaaggccgaatccccgactcatataaataacaaggctcatacggatgcctctgctggctatttgctgacttttttatattcaaagcagcccgtccgcgcacccattcctgaataaaatcatttttagtccagtcttttaaaatggcgggaaactgatattccaaactagctctatctacccaggcttctgtaggtgatcctccaacggcattgcaaatcaatccaaccggaaccttcagactatctcttagcatcttaccaaaatagtatgcaattgccgagaaatcagaagctgtcgccggagtacaatttttccattccgtatccttataatattggagatgattcaacgagtcaagtacggtcgcctcccattcgacggcatttgtgcgccaacgtgctttcatatcatacaaacgaagttgctgatctgcggcacgtggaatatcgtctcgggcagtcgaagcctgtttcagcataaactccatatttgactgaccggaacaaagccagacttcacccgctaacacattttgatattgaaggtctgtctcatccgttgagatctttaaggtataaggaccacccgcctttaaaggaggcaacgttaccgaccattttccattcagacctgcttttgttttcatttgccggtcggctatgcttacagttacccggtccccggcattggcaattccttgaaccgtcagcggaacatcccgttgcaataccatattgtctgtataaagcaacgacattttcagtccgccataatctccggtaatggcggaatatacggtctgagccataataaacgctccttcggaatcagggtgtacggcgtccgtcaatatgaaagggtatggatacaacggctcatgaaagtcgatcaactgtactccggtatagcgtgccacattctcaatagccaattgtatttctccatgccagtcacgtgtccctgacaggaaacgaggatgtcgatcggcaataggtgcaagtctggcaatcataatccggactttagaattagccgcccgaaaagaatcgatcaattcaatgtaatctttcacaaagaaatcacgataatcgggccaatcacggggatctgtatcattgatgcccaaatgaataaccacaatatctccggcgaagtcgatcgctctgcgaaactcatcttgctgcatgtaaggccggtgccctttattcaacaaggtagcacccgatttgccgaagtttttgacttgataaggctctcccagcatcttctgtaattgcgccggatacgattgcgtagtccggtcgggcaatccataaccataggtgatactattcccgatgcaggcaactttgatacgatgttgttgcgcattagctgatgcaataaacaaggctgcaacaacaatcaataatacatttttcatcatataaaagtctattacattttcttttccggagaatagatcagtccttctacggccttatcgccgtcaggagtaacaaatactgcagtaaacatccatttaaccaatcgaacttcattcgttgagaatttgccgacaggcagtttcagcaataccttattccagcctttatgcaaatgaacccgtagtggcggacgtgccacacaattctcattacctaaggctgtttccgaacttttcacgcgatgagtagcagaccatatcggaggcagtatttcctgatcattaatccaaatacggctttctttataatcccactttcccggtaatggcggcaggtcattctcagaacgtccataattctgaaattcagcccataagccgacttcctgtgctttagaagaatagacatacgtgtaggcataagcagtatgattctcctgcgggtctttataaaaagccggcacaattttcccccatacgtgtcggagatagataccggctcctatggcagggtgcactccatattgcttcccttcataggtatatgaatctttcaactcttcttccggtggaaaaactttagtcagatccccctcattcggaaaagcatctgtaatgttccattttacatgagtctgtttgacataggcaaatggataccctttaaacagatgttctttataccataacatacgactttcgaaatcctcaaaattacgaaagacctcagagttttcatctacaggaagaattgttccctgcttatcgaaatattcagttcctcctccccgccatgaacgctctgcgatagccagcatattcgggtaaaagttattttccagaactatattccactctttgtcgattaaacgatcattccagatacccataatgactccggcaagattatcacttcccatatccacattataaatccgactattatatagagcaattatatcgccgaacgtatcaaaatgattcaaataatggaaacgggagtcaatagcgggaataccttgttgggctttgccacgatagctccaaagttgcatcatgtcgatctcacccgtcttatacttccatccgggattccaggaaatcacttttttccctttgtcacggatataagccaccatttcgggcacaaactgcggattagtaaaatgcacttcgtctgttccaatatggagatatggaacatcaaacgtttcacaaatctcatccagcaggagtttcaggatcttcattccttccggactttgcatatcatgacggaaagtacggataaatgccgcactatgtccgggcatatcaatctccggaatcaacagtacctgatgagctttacagaacttggtcaactctctcgcttcctccagcgtgtaatatttacccgccatacgagtcatattcgcactatcattcaacatcggaaagattttactttccagacgccatgcctgattttccgtcaagtgccaatgaaaggtattgattttaaatcgggataatatagctatctcacgtttcaactcctccaaagacaagtagctacgccctacatcctgcatgaaaccccgaatccggaaagccggccaatcagtgatagtaccacatttcagtcggattttctttcccttttcttcttttagctgatatagcgtctgcatcgcccaatatactccacgctctgctacagcctccacagtaattgcctttggagtaatagtcagacgataagcctcttcctgattgacaggtacattgtcaatcgcgtcaaccaattttatattgatagaggataccgactgatcagtcagagtacctcccatctccgtcacaaactgcttccattcctgcgaaagcacaggagtggaaagctgcattttccccacgacaaaatatccttttgcaagcacacattgctgaggttggggaagcagacgcaaatgatctgctcccaatatatataaggtatggaataaaaatgcaatccccaaaaagattcgaagacttttcatcgaatcaaatctttcagttttactgcttgaaatgtcatgtgtgctgcactactctcatacaagataccaatcgtttcccgatcaatcattgtcaaacagctatatccccagccttctccttcatccagcattaactgatgttcgggaagccaggtcagtccgccgtccaggctggctttaatagttatatgattgcgtcctctggtcgtattcggattcgagaacaaaaggatatctttatcaagtacattatctttagcttccacatggatcaaactggccatacatacaggttcctgcaaggctttccgggaggaaggatgttctgtccatgtcttgcccagatcttttgttattgccacagcacggcttcctccacggttatcccgcatattcagcatcagcactccgggctctgtttctactacttgcgcttcggttgtattggtacgtgccatgttgtgcatcttccatgtttttccgcggtctttactatacatgatgccggcattaggtacacgggtagagtcgataaactgagtagggaatactaatgttccatcactcattgttattccccgtcccggtccctgaagcaagaaataccaggaagggtcttttacttgttcggttatattaatcggtttcgaccaggttttaccgtcatccgtactttttgccatcaccagttgtgctgtttgatatagatccattccgggatgagaactccaccaggcacgttgattacccattccgtgtgtccatgcggcaacaacccatattgtattcgtttgggtatctaccagaatagaagggtcccctaccccattctgtgcagcaggcaaaccatcgtattcgccgaacgaaagaggaaggcgcatcttttcccatgttttgccaccatccgtgcttcggctcaaaccgacatctacatattcctgcagatcgacactgctattataacggacatcatatacgccaagcagcgttcctttatttgaagttaccaatccgggaatacggaaagaagccgaaccgtcatcaccggcatggcggacgcccactgccattcgatgaatgatgtctttcggcgaccgttcttcacaaatggcttctttaccatctagcttcactgattgaagttcggaacttattttcgtgaatagagaagtctccggcttcatctgcaagctgatccaaaagaaattaatccccgggaacaacttataatgactcttcaaaactacttttgcagaaggctgcaagacttccgcacattttatcgaataagacggtattgctgccaatgtattccccggacggtgactggatatatagtcaacaggtgcaaacctcttctttcctttatcttgtaaagcttccgtaccgccataatagagtttgactgcctgtacatccgacagattgacactctttccaaaatccaaaacgatctcatccatcatccggctttcttttgcatctaaacgaaagtagaacaatacgttatcctgccgctcaattaaaataggaatttgcgtctgatgtacaaaaacggtgtctgaagctttcacaaagatagagcaccctaacaagagaacaagggtaagtaaataatgatttcttttcataaatgggggtattagttagtttaacgaaagcaaagataagattttctcagcatatatttaacagtcaaagcgacaaacttgcgttttttaccaagttctcgtaggactagtcaacactctgaccaccgttcttgctcttgtgatcatcgacagggtcggccgcaagaaactggtctattacggagtttcggggatggttgtctccctcctgctgatcggcatttacttcctcttcggtgattcctggggagtatccagcctcttcctgctcgttttcttcctgttctatgtattctgctgtgccgtctccatctgtgccgtggtgttcgtgctcctctcggagatgtaccccaccaaggtgcgcggactggcgatgtccattgcaggattcgccctgtggataggaacgtacctgatcggacagttaaccccctggatgctccagaatctcacccccgccggaacattcttcctgttcgcagtcatgtgcgtgccgtatatgctcatcgtatggaaactcgtgccggagactacaggaaagtcactggaagagattgaaagatactggtcccggtcggaacagtaggagaaagaaagagaccttaataacagtaaactaacaacaactgagaagtatagagaagccgcaggcggtttttgcatggccattcaagacacgtttctccgccttcggtgtaccctatacctatctataataaaaacaatattatggattttaagaaactagcgaatcagtaccggaatgaattgttggacaatgtccttccattctggctcgagcactctcaagatcttgagtttggcggttatttcagctgcctggaccgtgaagggaaggttttcgatacggataagttcatctggttgcagggacgtgaggtatggatgttctccatgctttacaacaaagtggaaaaacgacaggaatggctggattgtgccgttcagggtggtgaattcttaaaaaaatacggacatgacgggaattataactggtacttttcactcgaccgttcgggtagaccactggtagaaccatacaatattttctcatatactttcgccaccatggccttcggacagctgagtttagcaactggtaatcaagaatatgcggacatagcaaagaagactttcgagatcattttgtccaaagtaagcaacccgaaaggcaagtggaataagcttcatcctgatactcgtaatctgaagaacttcgctctcccgatgatcctctgtaatctggctttggagatcgaacatctcttggatcccggttatctggaacagacaatggaaacctgcatccatgaagtgatggatgtcttttatcgtccggagctgggtggtatcattgttgagaatgtcgatatggacggtaatctggtggattgcttcgaaggacgccaagtgactcccggtcatgctatcgaagcgatgtggtttatcatggatctgggcaaaaggctgaaccgaccggagctcatacaacaagcaatgttaaccaccttaacaatgcttgattacggttgggacaagcaatgtggaggtatctattactttatggaccgtaacggttgtcctccccagcaattggagtgggatcagaaactttggtgggtacacattgaatctttgatttcattattgaaaggttatcagctgaccggagatgaaagatgtctggaatggtttgagaaggtacatgactacacatggacacacttcaaagatccggaatatccggaatggttcggttatctgaatcggcagggagaagtattgctgccactcaaaggtgggaaatggaaaggatgtttccatgtaccaagaggattgtaccaatgctggaaagtactggaaaatttataaacccttatttaaatagaacgatatggacggacgacgtaattttctaaaaaccgcatttgccacatgttcattgctagcaggcagcaaacttctgacggcatgcactcccatcaaaagggcagcatctgaagaagaagaaacatttgagacatttgccactcccaatgccttgaaagggatgcctatcaaagctacctttctggacgaaatcagttgggatattccgcaccagaattggggtacaaaagaatgggataaggattttaaagctatgaaaaagatgggaatcaataccgtagtgttgattcgtgctggtcttggtaaatggattgcttctccttttcaatgcctgttgggaaaagaagatgtgtattatccgcctgtagacttggtcgagatgtttctgacactggccgataaatacgacatggctttctattttggtatgtacgattccgggaagtactggcaggaaggattatttcagaaagaaatagatttgaacatggctctgattgatgaagtatggaagaaatatggtcatcataaatcttttcagggatggtatttatctcaggaaatcagccgccggacgaaaaacatgtctaagatttatgcggaagtcggaaagcacgccaagagtgtctctggcaatctgacgactttagtttctccatacatacatggagtaaagacagaccaggtaatggcgggtgacaaagccttgtcagtgaaagaacacgaagaagaatgggacgaaatattggataatgtaaagggagcagtcgatatcatggcatttcaggatggtcaggtagactatcatgaattatatgattatctggttattaacaaaaaactggctgataaatacaatatgaaatgctggaccaatatcgaatcttttgaccgggacatgcctattcgtttcctacccattaaatgggaaaagctattgttgaaactggacgctgcgcgaagagcgggaatggaaaatgcaatcacgtttgagttttctcatttcatgagccctaattcggcttatctgcaagccggacacttatacgaacgatattgtgaacactttattctataaacctatctaatattgtaatgcaatgaaaaaaagaatcaaatggaatccgaggtttattacctcattatttattgcgttcatgtgcacactcaactgtatggcacaaaacgtaataaagggatcagtcaatgatggtagtggcgaaccattacctggagtatctgtagctgtaaaaggtacaaccagcggtactatcacagacttggatggaaagttcagtatcaatgcccgaaataatgatgtattgatattctcttatgttggcatgaatacacaggacatcaaggtaaacaaccagcgtttcatctcagtaactatgaaagacgacgttgcttcactggatgaagtagttgttgtgggatacggtactcaaaaacgtggaagcatcactgcagcaatttctaccgtatcggacaaagaattgctgaaagctccgacgatgagtatcagtaacgtagttggcgcacgtattgccggagtggcagccgttcagtccagtggtcagccggggtctgacaatgcaacattgaccatgcgcggacaaacgggtatagtatacgtaatcgatggaatccgccgtacatcagccgacttcaacggactggaccctaacgaaatagaatcggtatctattctgaaagacgcttcggctgtagccgtttacggtttggatgccaatggtgttttcatcgttaccacgaaacagggtaaggcagaaaaaatgtctatcacttatacaggttctgtcggtttcagccagaatgcggaacaacaggaatggctggatggacccggttatgcttattggtataataaagcacgcgaactgcaaggagactctcaggtatttacagcagagatggtgcagaagatgagagacggagttgatggttggggaaacacaaactggtatgataaggtatatggtaccggcacccgtacacaccataacatttcagcaaccggaggtagtgacagagtgcgattctttgcatctatcggttatctgaatgaagatggtaacatagacaactatggttacaaccgtttgaatcttcgttccaatattgatgcaaagttaaccaagagcctcactttcaccttaggagtatccggtcgtattgagaaaagagattcgccgcgctattctgccgatccgaatgcctggcataatgttccgcaacaaatcattcgtgccctgccttatgtgcctgacacttatgaatatgaaggaaaaacatataatgtatccactccgacggcttcctctccggtggctccggtggcatctatcaatgaatccggatacagcaaatccaactattcctatattcagtccaatttcagtctgaaatatgacgcaccttggctgaaaggattaagtttcaaatttcaaggggcttatgacctaacatataatttcagcaagattctcagcaatccctatgaagtaatgatcatgaatcttccgactattgaaagcacctcattaacttattataaaggcactgatgcatcgggcaattcaatcagtctgagtgaatctgcttcccggggatatacatttaccacacagtcaagtgtgacgtatgacaataagttcgggaaacatactgtaggagctatgttcctggcagaaacccgtgaaaacaaaagtaatgcattaagtgccaccggttatgggctggactttattcaattggatgaactcaatcagatcacgaataagacaggaaacggagcagaaaaattcccatctatcggaggatatagcggacataccagagtagcaggtttcgtaggtcgtgtgaactataattatgatgataagtattatttggaagcttctcttcgtcacgatggtagttatctgtttggaggtatgaataaacgttgggtaacattacccggtgtttctgcaggttggagactcaacaatgaaagttggttcaatgctccctgggtcaataatctgaaactgagagccggtattggtaaaacagccaccagcggcgtaagtgccttccaatggagaaatacaatgggaatcagcaaaaatgcagttgttattggcggcagcagtcagaccatgatgtatgcttccgtattaggtaatcccaacttgtcatgggcacagtgcctgaactataatgtcggtgtcgacgcaacgatgtggaatggtttgttaggagttgaatttgacgtattctataaatacgagtatgataaactggccactgtgaccggagcatacgcaccttcaagaggtggatattatttcagttctgccaatgtgaacaagactgattataaaggtttcgacgttactttgactcattataaccatatcaacaagtttaattatggtgccaagttgatctggtcatatgcatacggtcgttggctgaagtatgtaggcgactcagacaatgctcctgaatatcagcgtttgacaggaaagcaaatcggttctaaatatggttttatcgcaaatggtctgtttcagagcgaggaagagatagcaaattcagcaacagttaaaggctataaggcattaccgggatacattaagtatgtagacagaaatggtgatggtattattacagcagcacaagaccaaggctatgtaggcaaaagtgctactccgaagcataccggttctttgaatttattcggtaattggaaaggatttgactttgacttattattctcttggggattgggcaatgtagttgcactgacagggcaatatacagctagtggttctgaaggtacacaagataatacctcatttacgaagcctttctatcatggtggaaactcaccgactttcctggtagagaactcatggacacctgatcacactaacgcggaatttccacgtctggaaatcacaggtccgagtaacaacaatgggtactcttcaactttctggtacaggaatggtaactatatgcgtttgaagactgcacagataggttacaacttcccgaaaaagtggttaaatccggcaggtatagaaggactaagactttatgtagaaggatataacctattgaccttcagtggacttaccaaatacaatatcgacccggaatcaccggcggtgaacaatggttattatccgcaacagagaacatatacgctaggtgtaaaactaacattctaaaaaacggaagcatatgaaaaaaatattattaaatatatcattagcactggcactaggctttagtataagttcgtgcaatgactggctggacggtgtggagcaaacctcgaccgttagtgatgaaattgtttggcaagatgaagcatacgtggataaatacgtcaatgcattctatacatatctaaacaaatacggacaatttggtgaagctcagttctcaggaagtttaacagaaagtttgaccgagacattcaaatacggttcagtagctttaggagacagagccggacatccgaacaattacgtaactaatccggatgttatcagtccggacggatgccgttacaacatttgggataaggatttggcttatggcaatatccgtcagatgaatcagtttctggttatgcagaagaaatactctacattcccggatgataagaatctgaaatgggaagctcaggtacgcttcttccgtgcttatgtttattttcagttagccaaacgacatggtggagtcattctgtatgacgacctccctacctctaacgacaaagcacgcagcacggcagcggaaacatggcaattcattgcagatgacctggattttgcggcaaccaatcttcctaaagaatgggatgcagccaacaaaggacgagtgacaaaaggtgcggcttacgcattgaaatcacgtgctatgctatatgctgagcgttggcaggatgcttatgacgcagctgatgaagtagaaaagttacagttgtatgatttggtggacaactatgcagatgcttggaaaggcaataataaagaagctattttggaatttgactacaataaagacagtggcccgaaccataccttcgaccagtattacgttccgcaatgtgacggctacgactttggtgcgctgggtactccgacacaggaaatggtagaatcttatgaagataaaaacggaaacaaagtagactggtccgaatggcatggcactaccaccaaagaacctccttatgatcagttggaacctcgttttgcggctactattatttatcgtggctgtacgtggaaaggcagagtgatggattgtagcgtaggtggaacaaacggtgctttcatggcttatcgtgaacagtcatactcctatggtaaaacaacaaccggttacttcctgcgtaaactgttggatgagaaactgattgacgtcaaaggaaccaaaagttctcaggcatgggtagaaatccgatttgccgaagttctgttgaataaggctgaggcagcatacagacttaacaaaaccactgaagcacagtccttaatgaatcgcgtccgcggacgtcagggagtaaatctgccgggcaaatcttccagtggtgaagcatggttcaatgattatcgcaacgaacgtaagattgagcttgcatacgaaggacatctgttttgggatatgcgccgttggagacttgcacacattgaatataataactatcgctgccacggtctcaagattacgaacggtacgtacgaatacattgattgcgacggacaagatcgtaagttcccacagaagttatacgttttaccggtgccgacttctgaaataaagaataatgcgttaattgagcaatatgatgaatggaaataactaaaagcttaatacaatgaaaaataaaatattatcaattatttcagtcattgcgtttctaatgggtataagcgcatgccatagcccggaagaattcaatccgactgttgaaaggaacataatcaataacttgacagcatccttcccggatgatgacagtgatgacaatagtttcaccagtgagatagattatacaaaccatgtgattaccgttgtatttccatataactatcccaaactttcggacaatgtcctgcaactgtctgatctgaaaaaaatgcgtgtgattgctgatctggacaataatgtatatgtatatcctacattattatttatggatatgacgaaggataactttataactgtgaaagaccagacgggcgcaagcaccgaatataaagttgtggcagaaattcgtaaaagtaatgagtgcgcaattacaaaattcaatattacgagtctgggattatcaggcattatcaacgaaagtaccaaaactatttctctgattagcctggaaagtataggtgaagtattagcagatatatcgatctctcacggagcaacgatctcacctgatccaagaacagtcgcattaaattacgaccaagaccagaaaattactgtgaccgcacaaaacggcacaactaagtctacgtatactgtcaagaaagaaatcccagaaaagattgctgccggcttacgcgcaaacagtgctaaacttatttgggctaagaaacttacagacataggtatttcaagttctgatatgacaactggtattgctgtaacaaatgattatgtagttattaatgaacgcgccaaaaatcctatatacctgaacgccaagaatggagaaaaagcagggacaatgaatattagttttgcaggtagtctgacaaacttctatacaacatcagacaaggacggtaatatcctgttcacgaatctgactccaaatgctggaccagcctttaccgtatggaaagcctcgggagtagaccaagcaccggaaaaatacatagaatttactacttcactggctatgggtagaaaactgtcagtatctggcagcctgaacaataatgctattataaccgctcctatctatgctacttcaggacagtttgcccgttggcaggtagaaaatggtgtacttaaatcacagacgccggatattattacagcacaaggaataggtgcctggggtacaaatgccgatgtcatttactccgatccgacagacctgaccagtgattattttactacattctacgccgaaccacgcaacctatgctggatggatggaaaaaccaattcaatcaagaacaagggagtggcacttgatggaaactacgtaccaaatgcagttgatcatgctgtatttaataaggtggaatatgtagcttcaaatctggtaaatccatggagttggggaactgccgacaatatatacctgtttgatctttcatcaggttcattaggaactcaggctattgacttcggaagtaccggtctgggaatcaatggaaactatgggtctaagattcttggaaacacaaacggtaattattgtggtgatgtagtattgaaagtttcagatgacggttattatatgtacatctacttcatgttctgcaatggatatgtaggttgtgtacagtgcgactgtatcgacatgtaaataccatctttatgcaagaagcctgtacctctttcaggtacaggcttcttacttcaactattaagtcgtataaaatgaatattaagaaaaatataataaaaacatttatggggggaatagctgcctgcttgtgcatggcatgtggcggcaacgactcaaaagattattggggagacaccagcggaggagaagacgaagaaccgacagagaatcctaatgcttccaaaccccgttatatctggattgacgctgctgccaactttcccgattttgccaacagcaaagaaaatatagctcgtgatctggctttagccaaagatgccggtttcacagatattgtagtagacgtacgtccaactaccggcgatgttctatttaaaacaaatcttgtagatcaagtcaaatttatgtatgcctggatcggaagcaactatactaaagtagaaagaacggcaacatgggactatctgcaagccttcgttgacgaagcacgcaaacaggggcttcgtattcatgctgccatcaatacttttgtcggtggaaatcagattgacggaggcacaggactattgtatagagaccagtctaaggcagagtgggcaacacagatgaacatgcaggtagggattacaagcgtaatgaataccagtgaaagtaccaagtttttcaatcccgcccatccggaagtacaaacgttcctttgtgacttgctgaaggatcttgcaggttatgatctggacggtatattcttagaccgtggacgtttcctcaatttacaagcagacttttccgaagaatcccgcaaacaatttgaagaatatatgggaggcatcagaattcaaaactacccgaacgacatcctggcaccgggtgcttccagtcttcctgccacctatcctaaatatctgactaagtggttggaattccgtgcaaaagtgatttatgactttatgcagaaagcacgcactgctgtaaaaggagtgaaacccggcatcaaattcggagtttatgtaggcggctggtattctacctattatgatgtaggtgtcaactgggcagcttccacttatgatacctcgcgttattacaactgggcgacaagcaaatataaaaattacggctatgccgcctgtatggatcaaatactgatcggtgcctatgcctcaccgctaaaggtacacggtacgacggaatggactatggaaggtttctgttcattggctaaagataaaataaaaggagaatgccccattgtagccggaggtccggatgtaggaaactgggataccaataatcaggctactcaggaacaagaaaatcaggcaatcgtacaatccgtaaaggcctgtatgaatgtttgtgacggatattttctgttcgacatgattcatctgaagaaagccgatcaatggcaatatgccaaagaaggcatcaaactcgcaattgaataaaaaagaataaccgactctttagaatatgatcgtatgagaaaaataacaatagtacttttatcaagtctgttaatcattgcattgggagcatgcaaaaacgcaactccccaagtagaaaatgccaagcccgctttgatgtggtttgatgcggaagcaaactttgaacgcttcagcaatcctgactccattgattattatctgacaaaaataaaatcattaggtttcacccatgctatcgttgatgtacgtcccatcaccggagaagtactgttcgatacggagtttgctcctaaaatgcgtgaatggcatggatatgaacgcaaagacttcgattacttgggacatttcatcaaaaaagcccatgaactgggtatagaagtacatgcttcactcaatgtctttgtcgcaggacacaattatttcgaccgtggattagtctattccacgcatcctgaatgggcatcgacagtatacactccggaaggaatcacttccatcaccaacgaaaagaagaaatattcggcaatggttaatcctgtcaatgaagagtttcagacacatatattgaatgttctcaaggatttagtgaaacgttatcccgatctggacggattgatgctggaccgtgtacgctatgatggtataacggcagacttttcagacctctctcgtcagaagttcgaggcgtatatcgggcagaaagtagaaaagtttccggaagacatcttcgaatggaaaaaggatgagaatgataaatactatcccgaacgcggaaaacatttcctgaaatggattgaatggcgcaccaagaacatctacgacttcatggcccgtgcccggaatgaagtaaagaaagtgaatccggatatttctttcggtacatacaccggagcatggtatccttcttattatgaagtaggcgtaaactttgcgagcaagaaatacgatccgagtgaagattttgactgggctacttccgaatataagaattacggttatgccgaactgatggacttatatactaccggtaattattataccgatatcaccatagaagaatctctgaaaaacaagaagagcgtatggaacgaaacagattcacaggcacaaagcggcacgtggtattctgttgaaggttcttgtcagaaattacgcaatatcatgaaagataataaatttatgggtggtattctggtggaccaattctatgacaatcccgccaaattatccgcaaccatagaaatgaacctgaaagcttccgacggactgatggtattcgacattgtacatatcatcaacaaaggattatggaaagaagttgaaaacggaatgagagccggaggagctctgaagtaaaatcgaaagaatacgctatgaatatgaaaagattctcaattatctcccttttgttatggataggcattctggcatttgcctcaggaaagccaaaagtaatgtggttggactgttcggctaatttccaacgtttcagctaccccgattcaatccgcttctatgtagacaaatgtcatgaagcaggtatcacgcatctggtattggacattaaagacaatacgggtgaagtattatatcccagcaaatatgccgcacagaagaagaattggaaaaacttcgaccgtccggattttgactttatcggtacctttatcgaagctgctcatgcccgcaatatgatcatctttgctggaatgaatatatttgctgacggacagaatatcgtgaaacgtggtgccatcttcgataaacacaaaaagtggcaggctatcaattatgtaccgcgcaaaggactgctccctgtaacggaaatagaaggaaagcctaccatgttcctgaatccggcactgaaagaggtgcagaagtatgagattgatgtgatcaaagaagttgttcggaattatgcatttgacggcatcatgcttgaccgtgcacgatatgattgtattgattcggacttttctcctgagtcaaagaagatgtttgagaaattcatcggaaagaaagttgagaagtttccggaggatatttttgaatggcgccctaatgccgaaggaggcatagaccgtgtgggtggcccatactatcatcaatggctgacgtggagagcttctgttatatataactttataaaagatgtacgtacttccatcaaaaagataaagccggaatgtatgttggctgcttataccggtgcatggtatcctacttactttgaggtaggtgtcaactgggcaagccgtaattatgatgtcagcaaggacttcagttgggctactcccgactataaaaattatggctttgcagagttactggatttctatacgaatggcaattactactggaatgtaacgctggacgattattataaatcttccggtaaatttaagaatgaaacagacagcgagttttctaccggagaatatttatgtgtagaaggcggttgcaaatattccaaatacttgctgaaagatgcggtgccagtatgcggcggtctgtatgtagaagactacaaacgggacgtaaaccaattccagaaagcagtccgtatgaacttgaaagaatcggacggtgtgatgattttcgacattgtacacattatccgcaacggatggtgggacgaactaaaagaagcactggacgaaactaagccggatgaagcgcgaatgatcaaaggaaccgttacttgcgatggcaaaggtatagccaatgtggtagtgacagacggacagcgttgtgtcactacagacaagaatggtatttaccatctacccaatctcggaaacacacgctttgtatatatcacgactcctgccggatacttgacggattgtgaacagacgattccccgattctatcaggaaattgacctgaacgagacgaatgaatataatttccgtctgaagaagaatcctaaagacgacagtaaacacttgtttgtgttggaggcggatgtacaggccggtctgaaagagcactgggatctgtacgctcccattgtcgatgactataaacagttaatcgatcagtattcggatcgtgatgtattcggactgaattgtggagacatcttttgggacacaccggccacattctttccaccttatatcgataaggcaaagaaactggatatccccatatatcgtgcaatcggtaatcatgatatggattgtaatggagctactcatgaaacgtcgtaccggactttcgaaggatatttcggccctacccactactcattcaataaaggaaatgcccactatattgttatcaacaacaacttttatgtaggacgtgaatacttctatatcggctatgtagatgaaacaacttttaaatggttggaagaagatctgtcttatgtccctaaaggtacattagtctttttcataacgcatattcctacgagaataacggaacaaaaaaggccatttaattacgattatgccatgttggcaggagaaacgatcaatgctgaggcggttcatcaattattggatggctatgaaacacactttctgacgggtcatcttcattccaactcgaacattgtattcaacgatcaccaaatggagcacaatacggctgccgtatgtggtatctggtggcatgcggatgtctgcatcgacggcaccccacaaggatacggagtctacgaagtagacggaaaccaagtgaaatggtactataaaagtgccggtcatccgaaagactaccagtttcgaagctatgctgcaggaacatctaaggaattccccaaagatattattgccaatgtctggaactgggataaaaattggaaagtagaatggctggaaaacggaaaagtgatgggtaccatgactcaatataccggagtcgacccgtatgcgcatcaagtatgtacagacaaaaaaagaaccatgcagagctggatatcagcagcaagtacaggacatatgttccgtgccactccccgtaatccgaaagctaaaatagagatcagagtaacagaccgtttcggtaaagtgtatcagcaaaacgtttctaaataaagattcatgaagtatatcatataccacctatggattatcagcctgctattcccattgggaatgcaggccaaagtcaggttaacttcgatctggggtgataacatggtgttgcaacaacaatcggaagtgaccttccacggcaaagcctctgccaatagtaaaattacgattgaagcatcatggaatcatcggaagctaacaacccgaagtgaccagcatggaaattggaacattcaacttcctactccggcagcagggggtccctatactattacattctctgacggtgaggcgcttacattaaataatatcttactgggggaagtctggttctgttccggccaatcgaatatggaaatgcctgtcagaggctttcggggacagccggtttatggttcacaaccctatatcgtagctgccgactccaaacgggaattacgtttgtttacagtcaaaagagattggagcacgactcctaaggaagaaggtattacgggatattggtcggaactttctcccaaagaagtcggagactttagtgctaccgcttattttttcggagatttactacaacgttcattggatattcctgtcggactgattcattgctcatggagtgcttccaagatagagacttggatggataaagagacactgtcacaatttccggaaattcaattaccggatattgaacaaaccaagttcgactggcctgcgggtacacctactttattatggaatgcaatggtaaatccgtggaagggatttcctgtcaaaggagtcatctggtatcagggagagtccaattctgctgatcccgctctttataaaaagctctttcccgcaatggtcgctcagtggagagaattctttcataatcctgcaatgcctgtatactatgtccagatcactccatggcaggccgaaggtaaagataggcttgatcgtgcatggttccgtcaatgccagctggaattaatgcaagaagttcctaatgttggtatggttacaacgacggatgcaggaagtgaaaaattcattcatcctccctacaaaattaaagtcggtcagcgccttgcttactgggctctggccaagacttatggcaaagaaggttttctgtatgcaggccctttgtataaaagccatcaattgaaagagaatgtagtagaaatcacttttgaacatggcagtgatggactgatccctgaaaatcaaaagttgcggggatttgaacttgtagacgaaaagggaaatatcgtaccggcagaagcggaaataatcaatggttctgcccgtgtgaaagtatggaatgattcggtgcctcatcctgtagaagtgcgttattgtttccgcaattatatggaaggtgatcttttcaataatgcggaaatacctgcttctccatttcgggtcgtaatacattaattaaacgaaaattatgaataacaacagtacacgagcttcttctttggatgccctgcgtgggtatgctattctgacaatggttctctccggcagcgttgcctggggagtgcttcccggatggatgtatcatgctcaggtaggtccccgctccaactttgtgtttgatggttctatatatgggatcacttgggttgacctggtgtttccttttttcctgtttgccatgggagctgccttccctttttcaataggtaacaaatacagaaaaggcagctcccgccggagaattatatacgacagccttttaagaggtttccggctgactttcttcgctatttttattcagcatatatatccgtgggtagtatcttctcctcaggatgttcgctcatggctcattgcattgggaggttttgccttgatgtttcccatgttcatgaggattccgttcaaaatgccggaatacgtaaggatgctgattaaaatactggcttatgcaacgggagtgttcatgctgctgaatatcaactatgccgatggacggacattcagtctaggctacagtaatattatcattctggtattggccaatatggccattttcggctcactgatttatacattaacgatcaataagccatggattcgtatagcaatattgccttttatcatggcagtgttcttgggaaatgaaaacgcagaatcatggaatcatagcctgatggcattctcgcccttaccgtggatgtataagtgctcctatctgaagtatctgtttatcgtaattcccggcagcattgccggagaatatctgcatgagtggttacactgcaaaaacacgatgcccgtaaacgacaataaagacgaacgcaaaagaatgccatggatactcttattgaccatcggactgatcgtattcaatttatacggactttatatgcgttatcttattctcaatttagtgggtacaatcgctatattatgcgttctctacattctcttgcaagtggaaggaaaaaacaccggttactggtataaactcttcagagcaggaacttatctgatattattagggctggcttttgaagcttacgaagggggaatccggaaagatccttctacgtacagttattacttccttgcatcgggacttgcctttatggcgatgattgcattttctattatgtgcgacatttattcttggtcccgattgacccgtccattggaatatgcagggcagaatccgatgattgcatacgtatccacccagttggtagtattacctctattgaatctggcaggactgggaacctatctttcctatctggatcaaaatgcctggctgggctttttacggggagtcatcataacttctctggctttattaataaccatattatttactaaattaaaatgtttttggaggacttgaatcatgttaatcaaacgtctatattttataacaacagcactgcttgccttctctatatgttcatgtggagaaagctatcctgatcatccgtgggaatgggatcaggaaactgaagaggaagaatcgaatcctgatatagtatcacaaggatggacgacagccgataatttcggaagtcttccggactatattcacatctataaatcacctgaaaatctggcgggaaagaaggcgattgcctacatagctgtcgcagatatgagtaaagctaaatttgaagttctgggcgacatcgctttctcacaggaagccaatggatatggaggtaaatcgatacataccccttcggagttttatgaatcttccaaagcaccggtagtcatcaatggaggattgtttttttacagtgccggattctattattcgcaaaatctagtgattcgtgaagggcagttactggcacccaatcagaactactattcaaaagactgggtaactatgtggtatccgactttaggagccttctgccaaatgaaggacggaacatttcaaacgacatggacttatcaagcatccgacggaattaattattgctatcccgcccctgctgataacgatataaacaaggatccgttgcaggctccgtcatctactttccccaacggcgcaaaagcattggaggctaccaccggtatcggaggtgtcacagttttactgcgtgccggagagattaaaaacacgtatgtagaagaaatgctggatatttctgcagcttccaatcaacctcgcaccgcaattggtataacaactaacaaaaaaatgattatctttgtgtgcgaaggcagaaacatgacagaaggagtagcaggactgaccactgccaacgtagctaaagtaatgaaagatctgggatgtacggaagcgctgaatcttgacggaggcggttcatcgtgcatgctggtcaatggcaaagaaaccattaaaggcagtgacggcaaacaaaggaaagtgctgaccgctgtcggaattaaatagatgatgaaacaattcttttttttcacaatgttgtgcctgttcggcattcagttacaggcacaacaaatgacgtaccatgatgcgtcatgctttcctcttttaggaaaagcaacacaagacacaggggcaagatatgagagactaccggattctctcaaaaacatttctcgtccccctttatggaatttgagtcgtaattcggcaggaatggcgatacgatttcgtagtaactctacccgaatagcgttgaaatgggagaatctctttaataaccatatgaatcatatgaccgatgtaggaataaaaggtcttgatttatattgttgggaagagaacggtcagtggagatttgtcaatagtgcacgtcctaatggaaaaacaaatcaagctaccgttatcgccaatatgcagcctaaagaaagggaatatatgctatatcttcctctttatgacggacttgtgtcactgtctataggagtcgattctttatcttccattgatcagcctcagattaattatccgatccgtgagaaaccaattgtattctatggaaccagcatcctgcaaggaggctgtgcttcacgtcccggaatggcacataccaatatcatatcaagaaggttgaaccgagaatgcattaatcttggttttagtggtaacggacaacttgaccttgaagtcgcaagagtcatggcggaagtggatgccggtgtcttcgttttggattttgtacccaatgcttcagtagaacagatgaaagaacgtatggaaactttttaccggatcattcgcaacaagcatccgaaaactccgattgtatttatagaagaccctattttcactcatacattatttgatcagagagtagctcatgaagtaacaaggaagaatcaaacattgaatgagattttcaattcactcaagaagaagggggaaaaagatatatatttgattcattcggaaaagatgataggagaagatggtgaggctacggttgatggcattcattttaccgacttgggaatgatgagatatgccaatttgataactccattcataaaaaaaatgataaagcgatagggtctatgaatttatcgttttcatccggctacatttaagcattaaaacagtagatttataagatgttatttaatctactgttttaattttctgaatatctctcaacgcatatcaactcaacctaaatgaatattcatggctgattctacgaaattcgaaaccttcggcatttattgaaggatgttccaataaagctccattttctccagtttctctagattcaatcagcttatatcttccaaaggatttttgggcgcttgaaacctttgaatcttgatcaggtttaataagatatgacatcaagcatactttacgcttatatcgatttataaaagcagaaatagaaggaacagccctgattgttcttaacgtttccaacaattgtatttccgctttttcatattttccaccgggatagatcacgtttttatccttatcaagtataggcttagataagttctcaatattttttttggtagatgtttgttcgtttaagatataaaaactatcacaactgcctcctgtctcgtgcaaaataaaatcacacctcttccttccggtttcaaattttgttcccttcaggcctattagatacgcttcataattaataacctgaacttctgtccgattactatgatcgaaagaaatattcccagtcttataatccacgatagatgtcagacctctgtctgtcaaatcaaagtgctcttcagcagtaatctcatatggaacatcaacaatggtacgatgtaatttataatgtgacggtagttcccgttttagtaagtcaatcattgtatctcatctaatttatcgtactcattgtatatctcgttaatatcatccgataggtaatccgtgtttatcagatgggcattttgaactttaatgctttttaccatcccatgctctactacatatacctcagtcttatgatagtccaatgctgcattttctattttcacccctttgtcaaatgctttaagcaaaagattcaaatgattaatgatatatggactatgagtagccaaagtcaatgtcatatatttatttccgttcaagcatttatctataagcatatttaatgatgaacgctgggctgtaggaaacatactcagttccggttcttcaatcatcagatgtatggaacggttggcaatatcaccgatattcatatcatgtctgaaagatgataaactatcatttttgcccaatagagtaactatagaagaattaaatccgtgtaccagatcaaaatgttttgagaaatattcagcgatcacagcaaggggtgtcatcgtttgaatgccagaagatgcatcttcaaaatgaattttataagtgtcatttacattgctgataaagaattgtctgcttccattctgagctttcttttcatagtagcgaacacctaaataaggcatttccagctcctttatcacttctgtagcttttttaaagtcttgaaaggtctcggtaaaatagaatcccaacgctgctccatcactcaaatttgctaataaaggagctatagctccccgtttatcagagaaaaatgagatcttctccaatgataaattctcgctgctgattatttttcttgttccttttagtcctttctgtggagtataggttatattacaatctcctttgctataaactatttcagtatcatttttgacataatctgtcatcccaccattacgtagatattcagaaatgcttaaatctatggttttatcaataacattacccaatttcaagtatgaacgaagatttatttgcttacacatatgtctcatcatagccagcacctttaaaatggtactttttccactacctgattcaccaataaagaaagtgaatggtttgatattatctaatttgacatcctttattggaccaaaggatttaatactgagatattctttttgttccattatttatataattctttattatagagtaaaggtagtctttttttcgagaacaacttcatttcaatgttactaaaatgattctacaaaaataataaaaaactttttagctataattactttcatttttttgcaacggacaaaacatacatagtaaaataaaaactcataacaaatagtttctgtttattgacttattatcaacaatactcagttgatcccagaatctttttactaaaaatttcaaactgacattctatatcacaggaaagctagttacatcgtatatataaattgacaatttatatatattcatgttttttatcgagtaatttgaatataacgataaaaagtaacaaattacacttatatacattttaccttcttatttttctatatttaactaaaaagagaagttttactagcttcatctgtatactatagttaatttaagccaagttctcgtaggactagtcaacactctgaccaccgttcttgctcttgtgatcatcgacagggtcggccgcaagaaactggtctattacggagtttcggggatggttgtctccctcctgctgatcggcatttacttcctcttcggtgattcctggggagtatccagcctcttcctgctcgttttcttcctgttctatgtattctgctgtgccgtctccatctgtgccgtggtgttcgtgctcctctcggagatgtaccccaccaaggtgcgcggactggcgatgtccattgcaggattcgccctgtggataggaacgtacctgatcggacagttaaccccctggatgctccagaatctcacccccgccggaacattcttcctgttcgcagtcatgtgcgtgccgtatatgctcatcgtatggaaactcgtgccggagactacaggaaagtcactggaagagatcgaaagatactggacccggtcggaacagtagaagaaagagaccttaataacttaacacttaaagatatatggattttaaaatactagccgatcaatatcggaatgaattattggataatgtccttccattctggctcgaacactctcaagatcttgagtttggcggttatttcacctgcttagaccgcaaaggaggagtttttgatacagataaattcatctggttgcagggacgtgaggtatggatgttctccatgctttacaacaaagtggaaaaacggcaggaatggctggattgtgccgttcagggtggtgaattcttaaaaaaatgtggacataatggagattacaactggtatttttcactcgatcgttcgggtagaccactggtagaaccatacaatattttctcatatactttcgccacgatggccttcgggcagttgagtcttgctaccggaagtcaggagtatgcggacatagcaaagaagacttttgaaatcatactctctaaagttgataatccgaaaggcaagtggaacaaggttcatcctggtactcgtaatctgaagaacttcgccctcccgatgatcctctgtaatctggctttggagatcgaacatcttctggatcccggttatctggaacagacgatggaaacctgcatccatgaagtgatgaatgtcttttatcgtccggagttgggtggtatcattgttgagaatgtcgatgtggatggtaatctggtggattgtttcgaaggacgccaagtgactcccggtcatgctattgaagcgatgtggtttatcatggatctaggcaaaaggctgaaccgaccggagctcatacaacaagcaatgttaaccaccttaacaatgcttgattacggttgggacaagcaatgtgaaggcatctattactttatggaccgtaacggttgtcctccccagcaattggagtgggatcagaaactctggtgggtacacattgaatctttgatttcattattgaaaggctatcagttgaccggagataaaagatgtctggaatggtttgaaaaagtacatgactacacgtggacacacttcaaagatacggaatatccggaatggttcggttatctgaatcggcagggagaagtattgctgccactcaaaggcgggaaatggaaaggatgtttccatgtaccaagaggattgtaccaatgctggaaagtactggaagagttacgagaaacaaatgaaattatacatccatgaaaatcacatatctaacatataatacacattcttatttttattaccctgatatgaacagacaatacttctatataatacttacaatttttctttttacaggttgtagaaaggatactggatcaagtaacccagtattagaacagatgtgccagagattatttcctcaacatgcagattcttttgaatttgaattattaaatgactcaaaccagatggatcgttttatactagaatcggcatacaagaaaattcgcataaaaggaaataataataattctttggccgtaggtcttaaccattatctgaaatattactgccatacgaatgtatcttggtatgcctctgatagcattgatatgcccgaagagttaccagtaattcctcaaccaatatctatccgttctaagtgtgacaatcgtttcttcttgaactactgtacatttggatatacaatgccttattggaaatggtctgattgggaaaggttgattgactggatggcattaaatggaattacgatgccattagctatcagtggacaagagacagtatggtataaggtctggagcaaattaggattaaacgatgaacaaatacgttcatatttcacaggacctgcgcacttgccctggcatcgtatgtctaatgtcgattattggcaaagtcccctgccgaaatcatggttggagcaacaagaagtattacagaaacaaatattaaagagagaacgcgactttaatatgacccctgttttacctgcattttctggccacgtacctaaagaacttaaagcaatctatccggatgccaaaattcacgaaatgagtcaatggggaggatatgattcaaaatatcgcagtcattttatagaaccaatggactctctgttcaacatcattcaaaaaatgtatttggaagagcagacggcaatatacggtacagatcatatttatggaattgatccttttaatgaggttgattctccaaattggaatgaagatttcctggcaaaggtttctaataagatatatgagtccatttaccaagtagatgctgaggctaagtggttgcaaatgacatggatgttttaccatgatcaaaagaaatggacacaacccagaatccgttctttcctggaggctgtgccagatgacaaactcatactgttggattactattgtgacagtacagaaatatggaggaatacggaaaagtactatgggaaaccatatatatggtgttacttgggcaatttcggtggaaactccatgatggtcggaaatctggatgatgttgatagcaaaatcaaaaggctctttgcagaaggtggtgagaatgtatatggcttaggagctaccctggaaggcttcgatgtgaatccttttatgtatgaatttgtatttgaccaggcatgggattatccgttaacaactgatcaatggattctaaactgggcaaaatgcagagggggaaatcaagacgaacatattctgaaagcatgggattcattacataaaaaaatatataaaaagcatgcaacagcagggcaagccgttttaatgaatgcacgtccaatgttagtgggcacagatagttggaatacctatccggacatcacttacaacaatcgtgacttatgggatatttggacagaaatgttgaaagccagtcatatagacaatactggatatcgatttgatgtaataaatgtaggacggcaagtattaggaaatcttttttccttgtttagagatcattttactcaatgctattcagagaaagacatagatggcatgaagaaatgggccaatcaaatggattcactattgatagatacagaccgtctgttatcctgtgaaaccaatttttcaatcggcaagtggattgacgatgcccgttcttttggagaaacagaagctgaaaaagaatattatgaagaaaatgcacgttgtatcctgacagtatggggacaaaaagcaactcaattaaatgactatgcaaacaggggctggggtggattaactaacagttactatcgtaagcgttggaaacgctttacaacagaagtaatatccgcctcactatctagcaaaaagtttgacgaaaagcaattttatcaatcaattactgacttcgaatatgagtggacattatccaaagagcaccatcctataatttctggagagaacccgatattgttggctaaaacattatcagagaaatatatccgatatttctattaagcacgtatatcccaataataatcaattataaaataaaacagcctatgaatataataccaaacttgtaattagtggaattatcaaatctaaagaagaaaaaaatacagaattacttaactttaaattattaatgtatgatgtcggacttacgaaaaaacattttttcaattaaaatctggactgttacgacattctgtttattatcactagtaaacatgaacgctagtaatgctcttgcgcattctttacaaaaagatgagatcaaagaagtaaaggacaatccttctggcaagaaagtcacaggaaaagtattggatgaatttggagaacctatccccagtgcatcgatattggtagaaggacgttcaaggggagttatcactgacttggacggaacatttgtgatagaagtcttgccaacagataaactggtcgtttcttttctgggaatggaaacacagactattttagtaggtaagcaaacaaatatcgtagttaaaatgcaaccccaaacagcggagcttgacgaagttaccgtagtagcatatggtaaacagcgaaaagcaagtgttatcggtgccatcaatacggtttcgatgaatgaactgaaaatgcctgttgctaaattgagttccggtttggcgggacagttagctggtatagttgtcatgcaacgttcaggtgaaccgggtgcaggtgctgatttttggattcggggtatcaatacttttggtgcaggcaacaaacctttagtgctggttgatggagtagaacgtagtatggaccttgtggatgttgaggatatcgcttctttctctattctgaaagacgctaccgcaacagcattatatggagtgcgcggagccaatggtattgtacttatcacgacaaaacgtggaaccgaatcagcgcctaagattaatgcacgggtagaatacggttttaccaatccggtacgtatgcccgaattggctaatacggaacaatggatcaattattataatgatattactctggaatcatccggacgcttggctatacaacctgaagaaaaagcaaaatacctgaataatacagatccggatctttacccgaatgtcgactggatgcaaacattgtttaaagacttctccaacaccacacgcgtgaatatcaacgttaccgggggatctcctaaaatacgttattatgtaggcggctccttttattcggaaggcagtgtattcaatatttcggataaagaccgctacgatgcttcaatgcgctataacaagtttagttttcgttcaaatattgatatcaatgtaacttcatctactgagctgagtctctcactgtccaatcaatatgagaccaagaaccgtccttatggttcactatcagatttgtatgcttatatgatccgaacttctccgatagctactcctactatttattcagatggcactttagctaaaccaagtacgggtaccaatccttataacagcctgaataactctgggtactcgcaggatttcttcaacaatgcgcaatcacttatttcgcttacacaggatttctcaaaaatggtaactccgggattaaaagccaatgttaagttctcatgggacgcctacaatgcgcatacactaaaccgcattgtaacaccatctacctactatgcaacaggacgtgatgaagaaggaaatcttgactttgtaaggagtactgaaggtagtgattatatgaaactcacacggacgaattcgggcacacgtactatcaactttgaagcctcagccaattacgaccgcctctttggagaaaagcaccgtgttggagccttgtttctttttagtatgcgtaactatacagacaatttcccgggtaattatgtagacgcttttgcccacaaaaacatcggtattgccggtagagctacttattcatattacgaccgttattttgctgaatttaacttcggatacaatggctctgagaatttcgcacctgacaaacgttttggtttctttccctcttttgctataggatatatgctaagcaacgaagctttctgggatccgttgcgttctactatccacctgttgaaaatcaaaggttcgtatggagaaataggtaatgaccagattggcggaaacagacgttttgcattcaactccaccatgaaagaaggacaatacggctatattttcggaacgaatcccggtagtggaagtatcgtaggtatttctacaggtattccgggaaacctgaatgtttcatgggagaaagctcaaaaagcgaatgtgggactggaacttggcttatttgaccagcttaaattccaacttgattatttttatgaaaagcgtaccggtatctatattcagcaagaaagtgttccttcaatcgtcggtctcaatgaaacccagtatgtgaatcttggagaaatgaagaatcaaggtttcgatggttctatggagtatgaacaacgatttaatgactggtatgtctctgcccgtgccaatttcacttacaatcgaaataaaaagttgtatgatgataaaccgactcctatatggccctaccaaagtgaagctggatttgcctatcgtcagcaacgcggtcttatagctctaggtctttttgagtcagaagaagatatagccaatagccccaaacaaaactttggaaacgttcgtcctggtgatattaaatataaagacatcaatggtgataacgttatcgacgcatacgataaggtagcgattggctatacggacgtaccggaaataaattatggatttggtattagtctgggctggaaaggatttgacgcttctctgtttatgcagggagtaggaaatgtgactcgtattatcggtggagacgctctttatggtgcctctgataatatagagcgtttaggacagatttacgcagatgtagccgaaaaacgttggacaaccagcaatcctaatcctaatgctacttatccacggctttctatgagcaaggtagagaataatcttcaaccctccacctactggcaacgtaatatgagttttcttcgtttgaaaaatgtggagataggatatacccttccgaagcatatttataaacgtctgggcatgtcatcaattcgtgtttatgcacagggtgtcaaccttttgacattcagcaaattcaaattgtgggatcccgaactcgattccaactatggaaatatatatcctcagatgagaacaatcaccttaggtcttaatcttaacttttaaagtatattagaactatgaataaaaagatacgaattttaggaatattcctatacttcaccgttgcattcagctttgtatcatgcaacgattatctggatgtgactttgctcgaccagcttacacaagacgaaacctttagtaagcgtgtctctaccgaacagtatttagcgcatgtttatagctacttgccacgggaatatgaatatctggaagaaggaagcgcagttccccgtagtgatgaagccatgttctcctggtatcagtgggtcaactacctctctttcaataatggatcatggggaccttctactccaaactataatatttggaaagcaaagtatacaggcataaaacaagctagtatattcatgaaccatgttgacgaatgtttggagattgactctgaaacgagacgtataatgaaagcagaagcacgttttctgcgagcttattattactttgaactattccgtcaatatggtcctgtgtatatctggggagacatcgaatcggatgaacttataaaaccggaaacgatagaccgtcatacagttgatgaaaacgtaaatttcatagctgaagaatatgataaggctattgcagaacttcctgcagagatcagcgatttcacaaaatgggcaggacgtatcaccaagggagcggcaatggctgccaaagcgcgcttaatgctctatgccgccagtccattgtataatggatgcgatctttataaaggacaaatgaagaatctgtatggtgatttcctttttccacaaagtcccgatcctcaaaaatgggaaaaagccgctaaagctgccaaagacgttatagatatgaacatctatgaattgtacaaagaccagactgaagcagaccctttactgcgtgccatcaaatcttatcaaggagttctttttgaagagtggaataaagagacgatctggggtgcctggggacgtaatcctactaatactggactcggagctataggtttctatctgtatagccggtgcatgcctcctagagtttgtgaattgggtgtcggtggtttctgcccgtctctgaaattagtagatacttatccgatggctaaatccggaagatatcctgttaccggatatgacaataacgggaatcctgtaattgatgagcaatcgggatatacaaataccggttttacagaaaatttcaagcagccgggagtcagttttgcacctggatttaaagcgcataatagctgtgtcggacgtgacgcccgtttttatgcttctgtatttccaaatggtttttattggatcaatcaatataaaggcataaaacaagttaccttttttacgggaggatcgtcctcgtacttagaatccggagattgtgtcaaagtcggatatatgtggagacgcccactcgatcctgctcttaatacagaaagtggcagttggggaaccgtattctggccctatttccgtttggccgaaatatatcttgactatgctgaagcttgcaatgagaagcccgaacgcaatgaaacggaagcattgaagtatattaaccttgttcgcgaacgttccggtttaaatgccctcgaaacagcgtatccggaagtgaaaggcaataaggatttgttgcggatgctgattcaaaaggaacgcatggtagaattagcctttgagggacaccgatattatgatgcccgtcgctggatgattgctcaacaagagtttcccggaccggaatattctcttaatttattggccacttcatacgaagattcttggtcgcggacatcaaatgtttggaaaggtggtcctcgggtatttgagcctaagcattatttcttccctatcaatcaagaacaattgagtgaaatgaagaatattactcagaattacggatggtaaatatatgtaatggatataaatatgaaaaaacataagacaatacaattcatagttgctgcactttttattgcatcggcatgtactgatgatcgtgataatctcatggttaatgatcaaatcggactattgcattctacctatacagaaacggagatattccgtggtatggataccccctatcaattatttgttatcaaaagtgggaaaggaaagcaggagacagaagtttccatttctgttgacgagactgttcttcagagttataatacggataatggaacatcgatccaattattaccttccgattgttataccattcttcagcctgctctgcgtctcaacgattccgactatcggaaagcttttgatattaaatggaatgccgaccgtctatccgatcttctttctacgggaaaggaatatggcttgcccatacaaatgagtgtggtgcaaaattttatctctgcagatgatgagcgactaaaaaccattattgtacctactattaaggaaccttatttgcaaatggatgttcctggtatgagtccggttactgattttatgccgactttcggcgatttgaatgaaagagaactgttcgtaaagataagaactaattattctaatgacgaagatatttcatttcagattgaagtcgatcctcagttagtcattgattataataccgctcatggcacggcttataaaatgttgccggagagttcctttactgtagataataaaggagttatattaacaggcatgaaggaaacattcattaaaattaaataccacaagaaagggttaataccggaagagggtacttatttatttggtgactatgtacttccactacgcattacttccgtttcaaaatatggtataagtcctgatgctgcgtccaaactgtacacagttaaattccaaccggacccaatagacaagaaaggatggagtgttatagatttcaacaactgttgtacccaagacggcggatggtatctgaatatgggatggggagtggaatcattgatagacaataatcctggcacacaatggctatgccgatgggatgtaaaagagcccttgccctattactttgtatttgacatggggaaagaatatacattattcagatttggatttgctaaccctgttgcaccagcagcacacgtttgggcacgcacatcgaaagccggttatgtagaagctagtattgataacgagaattgggttaaattaaaagactggacttctcccaaaatcggagaacccaacgttaatatggatgttcctgcgacacaagcccgatacattcgttttgtaataactgatacctatccgacttatgacgggctgagagttagtcttggtgaagtttatgcttggggtatgtaactaaaaacatgaaaattatgaactatttctcactatatctaaaaggattgatatgtttctgtctgttatttattactatggatagtcatgcgctatccatagataaaggatatagacagaataaaataaaagatctggcacttatttaccagggaggagtgcatcgtattgactggacttcggatcaatttctcccctatgtggtacatcagtttgcagatggacataaagactggttatttgacggattcttgtttttggagttcacagatgggaaaggctgtggctttgcaacacgctactcagataaaaatgcaagaaaaaaagaatggctatggttattagatcgtctttttgaagatggaaaagcgctgtctgccttagatcgatgtatcggaacacagattaaagaaattggaaaaccggattttactcatcagatagtactatgtcttccggaagttcttcccggacaaaaagattggggagaagtggatggcgagccaatggacttttccagacaagaggatcaggtgaaggccacccgttggtatatcgatgagttaatgaagcgattcaaacaggcaaaatacaaacatctgaaactatcaggtttctactggctggcagaggatattgatttcactaaagatctgtcagttccattaagtaagtatattcattcaatgaacaaaacattttgctggattccgtattggcaggcaaaaggctacaaccaatggaaagaattaggctttgatattgcttatcaacaaccgaaccacttttttaaagcctctattcccgataaaagattggaagaagcatgtcaatctgccgccactctgaacatggggatggaacttgaatttgacgaaagagcattgtttgatgccaaggactcgttttataatcgtctggtagcgtatattgatcattttgaaagacaacaagccttccgtacatctgcaatggcctattatagtggcaatcatgctgttcttgatatgtataaatcaacgaacccgaaagatcatgaagtcatggacagactggctaatctgattgtatcaagacgtggcaagcaaaaaaaagaatctcatcagaccaaagttattgcccatcgtggattctggaatacacccggatctgcacagaactcgctagcagctttagtgaaagctgattcaataggttgttacggttcggaatttgatgtatggctgacagctgacgatgagttgatgttgaatcatgacggatggcatgacggatactctctggagaaaacatcttctgacgtgctacgcactttaaagttaagcaatggggagaatatgccaactttagagcagttccttgataaagcgaagaaacttaaaatacatctgatactggagatgaaacccctcagtactccggaacgtgaaacgaaagccgttgaaatgatcctaaagttggtggaagagaaaaaattgactcacagagtagaatacatctctttttcccgtcatgtgatgtgtgagtttatacgtctggcacctcctaaaactccaattttgtatttgggacaggatatttcgcccaaggaactgaaacaattgggagctaccggggcagattacaattattgggcttatcataaaaatccggattggttgaaagatctgaaaaattcagggatgacctccaatgtatggactgtaaatatcccttctgagatgcaatggtgtattgacaatggttttgatctgataaccacagatgcaccgacagctttcttaggcttataataatcatttggataatatgctgatggaatctgccatcagcatattatatttatactgtttatacggacaagaataacaaaacaatgaaatcaattaatatcatagcaatcatgccttttctggcatcatctttcatgacgcaagctcctgtttatcaagatgtgaatcaccccattggagacagagtggtaggcgtatggaaaactaacagcaaacaagaaagtcatgtcagttgacgaaacaataactttcagtttagctgtcaagaacacagggaaccgtgaaggacaggaaattgttcagctttatatcagagacataaagtcttctcttccccgctcggtgaaagaattaaagagatttaagaaagtaaaattaatgccgggtgaagaaaaaatagtttctttgtctattgataaagaggcattaagcttttttgatgcggaaaaacatgaatggatttgtgaaccgggcaaatttgaagctatcatagcagcatcagctatggatatcaaagatgttctcaaatttgaattaaaataaagatagaagccatgacgaaacgtttaatccttgcattcgtatttttatcctggcacttagtagcctgctcgaatggagattcgggaatttcttccggactcccggataagccttctgcggaagaagactctcccgggactgaaacgatatccgaagaaatgagagtgaaaataaccggcgaagatttatatatatcagccaagttagatgccaaaaccgatattctttattggttcaagaagtgtatgttcaatgaactgttcacattttatagagtaggaacaattgacaacaatatgcctactcctgctactctgccagatgcttctccgacttctcttctgaatctggcttacagtgacaatatcggtccttttaatataaccggatacgggtggtgtggaggaaatcatccctatctggatgaagttactcaaactgcccgcaatatcggttatcgtatttatatcgacggaaaagaaataaagacagatctatcgactctgacaaaagagataaagattgaagtaatcaatgaaataatgaacccttccaaagccgataccagtagtggaaaaacacttctgaatgagatcttatgtattgagactgtcaattattctatttatagaaataacattcaagtcttggttactcatgaatttcaaaatgagtctcccgtgacagtacaaatgtattacggaatgcaatctatgtttgacaaggagacacatacattaactgccaatggcaagtatgtggactggacagtacaaaaggatgtttctacctttacaaagaaagagtatccgtcatttcgccgtttcattgagaaaagcgcaaatgcgtatcaatcttcttatctgtttgccgatggattgggaaatcatgaagaaatatcagatgatgatattatattcataggaaattccagcaataagacgtaccacaagattatagctgatagagaacacaaaaagggggatattattcattggagcggagtgtatacttggtttaagtctcctgtttctgatgatgatgatttgctgtgttatgaaggtgttatagataataaaaaggtcctttttatagattgcaagaagagcgtcgacaggacaatacagttgcctgtcgattatacaaagaagtcttttacgattatagagaaaagtaaatcaataacaattaccggtaataaagtaacagccaaaggacttagaattgtatccgacgggtccggaagttgtgtgattacctttgattaatttagaaaacgatatgtggaaaaatgtgttagttctggttagcctctgtctgttgtttgaagatgtaaatgctcaaactacaaagaacagatactataaagctaatgatgaaaacgtttcttacgtgggacgtacggaaatacagagtgatggctccgtttctttcgactggaccggtacttatcttcgtacccgactttcgggaggagaattgtctatgaagatttcagatactggtattaattattacaatgtttttgtagacagccttttacacaaaacggtaaaagtatccggtaaagatactttgattaatttcatttccggcatggataaaagcatccatcatgtgttgattcaaaaacgtacggaaggggaatggggaaagacaaccattcatcaatttgtgcttcacaataaaggagaactgatgaaagaaacggagtgcccgtccagacatatcgaatttatcggtaactcgctgacgtgtggctatggtgtagaagggaaagaccgtagcgaaccttataaagctgaaacggagaattgcaacttatcttatgccactattatcgcccgctatttcaatgccgattatacgcttattgcacattccggacgtggagtagtccgcaattatggagattccgtccgaatatctgccgtgacaatgaaagaccgtatgctgaatacatttgatatgaatttggataagaaatgggactttaaaacatacaagcccgatttggtggttgttaatttaggaactaatgatttttccaccaatatatatccgttggaagatgagtttattcatgcttataagctactaataagccgtcttcgtgcaaattacggagatgtccctatattatgcatcagtccggctattactcaacggcagatcgttcaatacatggagcgtatgcgcaaagacttgaatgataagaaagtttatatagcagttcttcccgaaggcctttgcgatccgactacagacctaggagcagtatggcatccaaattacaaaggtcaaatgaaaatggctatgtcattgattccttatatgtcaactatcacaggatggccattgaaaaaggaatcgttttattaagacttaccatgttatataattatcaaaatggcattttgtcattttgataattataaactctctaacgggcgtatttccatcgtttcataggatagagaataaaatgacagagatttgccgttacgggaaatcactttgttgcgaatatacatctagatgtattctttttgtgttatttttcacactattctgtaatatctttctctttttatattactttgcatcattctgattaatatttttcatcctaaaacaaagtctaataaataagatacccatcattttagagctaaaatatgctccttttaaacggacttagcgttgctttaaaagcaatgggacgttcctttaaaagcaaccttatgtttatttacaatcaaccttatgttttagctcaatcaaccttatgtttatttcaaactatacggcgttttttatgcaaatgaccgctcgtttattcataatcatgcatattaattcatgattttatgcatatctctttctatctttactcatctatcaaaagatagaaatagcaaaaacaggaaaataaggaaattatgcttcctgttttgctatttatctatcattttgttttctgtttaatttgtttttaatgcctgttattatactgtgggtatatctattgaatgatgtcaagttctccaaaaccacttgatcttagtaaaaaacatcgttaccaagacagctaaagacgtaatgattactccccgaaggaatccgagccacgcattctgctggaagtaagacaacagcgagacaagtcccagtatattagccaacggcataatgaataaatcactaaccacgtaagcgatcatcggattctgcccggacataacaagaaagcggctacttcgcacacatctgaaataatcacagacaagacttaagaataagagcgcaaggaatgctagaccggaagttacaaagaaataactaaaagtggcaggatctttcttgataccttcttgaaaaggttcaaaacatagccccaaaagaagaagatatgctccggcattaaatagctttttccataacaaagcgattccctctgtcggacgtaagaatataaatttgccaatcaataacagcacaagtgtcgctaataaattcacagccaacatacgggtgtaaagcccatagagattaaatacaataatcaccatagtcaatatcagtaacgcaattcctatcttacggtattgcggtgaagctggctgttcggtatcttttcggcccttcatccattccatcaagtactcaccggcaatactgccgggaattacaataaacagatatttcagataatcaaaccgatacatccagggcaaaggagtataattgaacaccacctgtgtccaggaaccttcgacagtacttcccaaaatgacagccatcagcagcaataaaactcccaaacgcaaccatcggttatgcatcgtaaaaatgtagagggcagaaccgaagatggccatattggctaacaacagaataatcacattactaaaatacagactgaacgttcttccatcggcataagaagtagtaagcatcatgattaccgcaattccgtatgcggctatctttatgccggtatgtgcccagtccggcattttcaaaggaatgcgcatgaacatcggaaacagaaccgcaaagcaaagaatagccagcagccaggctctgatgtcctgcggagaactcaacacatacggataaaaatgctgaatgaagatggcaaagaaagtcagttgtactccacgtttcaccgcttcatatattaatttcagtttagagtcacctttctctgcacgcttacctatggaaaaagggaaagctgctcccatcgcaaacagaaagaaaggaaaaacaaggtctacccatgtaatgccgggcaaagaaggattgaatatatgatcaggtggcggcgtctgcgcatgactcatccaaccggggagcacctgcgttacgatggtagcagaaagtaccatcgtaataatcgcatatcctctcaaagcgtctaatgcataggcccggttattcataaggaacctcctcttttcattccttcctctacttctttccacagatttttggtaatgatatgtacgatgtcaaataccattaatccgtccgaacggcgaaggttcatctctatcgtttccgaaagtttggcagggttgtcatagaattggtccactagaatacctcccataaatttattacctttcaatatctgacgtaaatgttgacaagagccttctacacaataccacgtaccggattgagcctgcgaatcagtttcgttccagatactccggttcgtttttctgtattcctcgatggttatgtccgtataataattaccggtagcataaaggtctatcagctcggcatagccataatttttatattcgggtgttgcccagctgaaatctttgcccggatcatattctttgctggcaaagtttacgcctacttcataataagatggataccaggcaccggtgtaggtgccgaaagaaacgtcagggttggctgcctttacttctttacgggcaagcgccatgaaatcagtaatgtttttagtacgccattccagccatttccggaaatattttcctggttgcgttatgtatttcccatctgcatttttagtccaacggaaaatatcttcggggaagtttgcgacttttttaccgatgtattcttcaaacttctcacgtgacaatgaagaaaaatcagcggttattccatcgtaacgtacccggtcgagcatcagaccgtccaggtcgggatatttgctcacgacttctttcagaacattcaggatatgggtacgatattcttcgttcaaaggattgatcatggcaccatatttatgcttctcttcggtgattggaatgattcctttatcgggagtgtacaccatcgaagcccattccggatgtccgctatataccattccacggtcaaaatagttgtgtccggcacagaatacattcaatgaggcgtgtatctccagccccagttcgtgcccttttttgataaagtatcccagatagtcaaaatcaccggctttggctcctttccattctttcatttgcggagcatattcacttttatataaaacttcccctgtgatcggacgaatgtcgacaaccgcatgtgtaaagcccagcgatttgattttttccaagtaataatcaatcgaatctttatgactgaagcgctcaaagtttgcttcggcatcaatccacattaaggccggtttctttttgataacgatccggaaaggagaagccggaagcccggcattattgcataattccccctgcatataattccggaagcagtagcggacttctgtcggggcactaacagaatcattccatactttcacagtagatgtgccattgatgacctccgcctttgcaggtcggaatataccatcggaacctacgatctcaaaacctttcacattctgattttccggagtcagtccttcctctccatattcaaagtctatttctacggcatttccctggatacgataggtcttgtagacaggaccggaatattggaatccttttcggccgtaagtctgggccagtgcccaataagctaaccgctctccaaccttaatcttataaggtgaatgtataaagagttcactgcctgcatctccggtggtcaccattcccactccgggaacttccttcatcagctccaactgacattgacggaaccatgcccaatccaacttgtcattcccttcggacttccagggagcaatctggacataataaaatggcatttcagcattatgaaagaaatttctccattgagaaaccatagcgggaaaaagctttttataaagagcaggatcgggagtattcgcctcgccctgataccagataactcctttgacagggaatcctttccacggatttaccattgcgttccacaacagagtaggcgtcccggcagcccattcgaatttatcctgatttgtatccggcaaggttacttcggaaaaatgagataaggtttctttgtccatccatgcttcaatctttgacatactccaggagcaatgtattaatcctacaggcacgtccaaggattgttgcaacagattgccgaagaaataagctgttgcactgaaatcggccacttcttccgaagatgcttcactccattgtccgtctattccttcttctttcggagtcgtgctccaattgttctttacggtgtaaagtcttaatggtcgtttaggattagcggacacgatatagggctgcgaaccatagaccggttgtccgcggaacccttttaccggcatttccatattcgactgtccggagcagaaccagacttcaccgatcaggatattttttaaggtcagctcttctccgtccgaaaaagtaatggtatatggtccgccggcttccggagtcggaagagccagtgtccattgtccgttccggtcacaatctgcatagattttccgatgattccatgaagcggaagcatatacacgttttccgggagtagcctttccacgaaaagtaacttctgcttgttgctgcaacaccatgttgtctccccaaatggaggtcagggttactttagcttctgttttcagaacaaagaacaaacttataagtagccaaaagtatctgtttctgaacatatgattttagtttatttgttttcaatagtttgagtatatacattaccaaaacggtcagtcaccttaatctctagccttgcgtttgggtcatgaggagttgcatgaaagagatgctcggtgagaaccggagatatccagtcatatttcaccttttccttatctgaacagatgacttttgccataggatcatatcctttgtacttttgcatttcgcccatcctttgtccattttcataccattctaccttccacagatcatcccagttccatacattggctatgatatcagaaggatattcatccgacgatcctgccggataagcatgaaactggtgttccagcggataacctgcgcttttataaatccacttcaattgatctccgttcacttcatatataccgtaacctctgggagttccgtctacattgatgtctgcacgccaccaagtgccacacactgctgccgtattatgctccatcaacgaatcattgaaacaaacgttcgtattgaaatgggtatgcccggaaatgatatgcgcattatagccctccaagagtttatatagtgcagctgtattcactgtttcatcctgatccaaagtattatatcttaactttttctgaaggctggagggaatgtgcatgaccacaaataccagcttatccctggacacatacgaaaggtctttttccagccatgcaaaagtccgttcatcaatatatccgatgtactggtagtcacgattgacatagaaacaattgtcgagtacaatgtaatgggcttttcctttattaaacgaatagtagatggggccgaaataactttcaaaagtacggtacgagtactcaaaagtacgtcctccgtaggtcatgtcatggttgccgatagcacgataaacgggaaagtccaaagtagatacggtattaatgtaagatggatacaaagagggggtatcacccacgatgtctccacaatcaataccgaatatgtctctttttcccgaataaggctgtacatattcttttatatcctgcaggaatctgccataggctttcacatcgtcttcggaagtgacttgcacatcagcctgcaccagaaacagatgattcgcatcattctgaggatttttcatcaactcaaaattatatccgtcttgtttatccatctctatttgttgatggaataagggaatggtcttttctgttttcggctgataaccggaaggcacggacaagtaaacaaaccgggcatccctttgaggagcaagcacatattcgcccgacttattagtcagaacacagtcgattccgtccgttacaactactccttgaagtcctttcccatgacaggttacctttccacgaatagtaccggataaattttgagcctgcaagttcaaactcaaactcatcaaaatgacaagttgtaataaatatattttcatagttatctattgttctttatacaaataaggcaattcattaacattaagtctgaaccttgcggctcagacttagtgctatgaatagaaaggagaatacttgtattgagtatattctcagattgaattatcaacttcctatttttgaacggactccagatagttatcaaatcctgtcttgaaagcgttccaatagtcgtacatcttgatatgacagaggtcgaatgcgaagaagccgtcgctattgtttatacatgcgtcgatggcatcaggtattttagcggcttgtccaccgttagtccatccggtaccattgcctatgtccggacctccggagaagggaacgtcacctttcagcaactcgcgaccgtttttgcaaaatccctccattgtccattcgccgctaccataaatcttatcgacagatgcataagcacctaagaatatataatccagatgatcggcataaccatagttcttataatctgctgttgcccatttaggatagtaggctgaggtgtcatatttaggacttgcccaatttactcccgaagtataataactggaataccatgcgcctacatacactccaaaattgatttctgaatttacggattttactttctcacgtgccttgacgataaagtcgtgaatcacttttacacgaaattccaaccatttcttgaaataggcaggctgatctgaaggtatctcatctgtgcctggtgccataatgtcttccggaaaatgagcaactgtttccccaatgtactcttcaaacttctgtttagaaacagccgagaaatcactttccaagccataatcgtcataacggcaacggtccagaattattccatccaagtcatatttagccaggtcacccagtaactgcaaaacgaagttctgcacatcatcgttagccggattcaaaaatttagctccataatcggtctcgtcattcaacaaatccatcgtatttgtcagaccgtcagcgagattagccacacttgcccattccttcttcgagtcatcacggaacagtattccatctgatccgaggttatagggacataagtaaccaccgacgaaagtattgactgacgcatgtactttcagcccctgacttctggctgcatctataaatgcctgcaggtaatcccatgtttcagtacgttcataatatacataacccgaacttccccacacatccattcgcttcacctgatctactgcagtagtgttgaacaaaacatctcctgtagtgggacgcacgtcaacaatgatatcagtaaaccctgcgttttttactttcaccatatctgtggagatattctccttattattcgcataatccggaaaattagctgccgcatcaatccagacatagcgtggcttgatttctgttacatccggattttccggtccctctgttgaattatcattccagggccatccggggattccatcagaatcatcactacatgaagtgatagcaaccattccgcaaaacgtcaataataatattttaaaaagatttctcatattatatatgtttattaatgtcagtaactcttttgaaacacattaattatttgtcgatacaatcaaattcataccctccgataatcttacagttgttgtcaacatagtagagacgaagtttatatccatctgtagttggagcaaacaatacatcacctgttgccgctacaccatctgcagaaccgaacgaagaaagtgaaggattgaatgtcaaagcgtctgaagtagataccgtaccggtaaacgatccgtctgaggttacatcgtacatatataagtacggagtgcctccccattgcgggaagtgagccgtagataccaatacaagatactgcgcattattgaacgttcttgcatccagacagttattattcattgcccaggaattgccattgtccgagttggataaagacttggacgcattattacttgttccattcacccaataaagtacgttaggatcataataggataagaaataatcgctttgtgcagtagttcctttggtgacaaccttggtatttgacacaggagatccccaatagccaacaccatttaccgatactacttcaggacttcccaatacaccgtctgttataatccagcgaacaaacgtattagaaccggacgaggctgtcccgtcacatgtagcaatgatagcggcatttgtattgatatcaccctgtacagatactttggtacccatatccaaacttgtattgttggtataagatatcaataaagttggaactgtggttacagaagaagtcttatagatagagaaggatttaccattagctgcttttgttgccaacaatatgtttcctttactatcacttgtcacacaacctaaagatgcaacacctacgcttcccaaagtcatattgccaatcttacttcctgtagaagcattataataggtaggagcagtagaaccgtcccctaagcaaacaactaaattattgccattaacggccagtgaaggtgagttggctgaagtccagggcaaacctataactcccatatccaatttaaacaattctgtctcactgccttttctatatccataagggatcttatccggcactgccttctgaactgtgtacgtctgcttcgtcactccatcgtgagcgatgaccgtcagttctacaggtgaattgaagtcaagcgcctctgtcttaggatccggcgacattgtcgcatgagaggaaagtgaatattctgccagacaggaagataaatcttctgcagaaatcagagataccgtcttatgctcttcgtcaataattccactaatatcttcggccggtattgagaaacttaataactgacatttattggatttcactctttcacccgtaatgcagatttgtttcttatatccctgcgcatctgtataagtgaagtaattttctttagtcaaatccaatatcgtcaaaacagggttaatagtacagttaggagctaactttgcctggaccctcattgtcttcatatattccgccgtttcattttcactgtcttccggataaaaccatggtataggaatcacatatttatctacagacgcatccgcaattgtgtagacaacagcttctttgtccacataaggacctgatgtaaaaagtgcggtcaagcttgtgattccctgccgctcagcagttggaagtacatattccggatcttggcaggaactcattaatgccaatactcctaatagtaaatattgtatattctttttcataattgttttcattttagatttattgccattctgcatattgagttaccgcaccgttattgtccaactccgcctgtggcatagggaaacggtacatcttagtcgggaagttacgatctttgtcatcacactctacataaatgtaattgaacgaaccgtttgcattctgttctatcttaagtccatgaagacggataccggtgaatgccgttgcagatagtttccagcgacgcatatcccaataatagtgtccttcataagctaattcgactttacgttcctgacgaatcgctttcatcaggtcttctccactcttgtccgaataaggcaagccgactctgttacgaatgtctttgatgtctttattggctttatcggcatagccactcaaatgatagcaagcctcggcatgatttagtaacacttcggcataacgaatttcggtccatggctgtgtacttgcctgcacagaagtgaaactatgagtctcatccaccagcttacgcaaataataacctgtggtagaacgtccttctggtttggcatccgttttccatgcagcccaaccatcagtaccattgacataagatgcgatcgttctgcctttccacgtcgcaccattataaagaatggttgctttgaagcgtggttcaagtttatcgtatggaggagttgccgttgttccttctgcagtatgccaggtactccaatccggaaaaccgctaccgtccgcatattcataagattctaccatttcttgtgtcggagttccaaatcctccggtcattgaattaccatccaatgctttatcacctccgggagccatatagccgtcaaaatcatgagttacagtagaactcttgtcatagcaatattgcagaatagcttcctgacttcctgctttaaatgcattagaataattctctttttcttccagcttatatcccatgcccatcacttcttcggcagcgatccgggcatcatcccatctttctgcataaagcattgcccgtgacagcattgcataagctgctccgctagtcagacgtccattaggggttttatcaaccggtaaatgttcgcccgcaaacttcaggtcctcatatacaaagttccatccttctgcttcggaactgaccggcatatccttctttatattatccagatcttcatcatatataatgacttccttataacgttttaccaagtcggtatataaatatcctctgaagaagcgcatttccgcttccagccgttcttgttccgtctgaccgaatgaggcgtactttttcagtttattgagaccttcattgacacggcgtacatattcatacatcgtcccccaattgcctaaataagtgctgacataacttactgtcagaacggatcctccataagcgatttcgctaggtatctggcatttagacatatagttataggaaccgtatttgagttggtctgtcaacgcttccgtcatgcctgccaggcattgtccgtcacgataaactcctaaataatcgatataacggtagaaatcgttgacagcttgttcggcatattccagtttactccatactagtttatctgatgctttgtccgtcggtgtcatgtctagataatcactacatgaaccaagccctaaagaggctcccaacaatatgatacttataaattttgttttcataataaatcttttaaaggtttagaaagtcagagttataccgcccatgattgtgcgttgttgaggataatatccgttattcactcccggagattcggggtcgattccatcgggaagaccggagatcgtgaataaattggaaccttctacataaattctaagattctgaattcccacagggctcatccactttttagggaatgtataacctagctgtgccgatttgagacgaaggtatctgccattacgcaaccagaaggtagaagctaatccattgtctcctccatgtccttgatttcccagagtcagacgtgggaatgttccattcggattttccgtggtatacgcattctgaaccagatataaaggtgagttggcaccttctttgaatgcttgtgtccagaccgtattgtcatcataaccattatagtaagttccggttaatgatacatcgaacaatgcgcctccagtaaattgtgcgcttaaatcaaatccgttccaggcacaattcaagttcagaccataagtcagttccggacgattgccccgtcctacacgtgttctgtcatcttcatctattttgccatcgccatttaaatccttatatttgatgtcacctacattaggacgggttccataccatgcggaattatcaatttcttcttccgaacggaacaaaccttctgccacccatacgactgaagcgtctacactgcgacctgtacgttttctccattctacagtattgggactatccggataacgaagatagcgatttcttgcaaaagtcaagttgaaactggctccataagaaaatggtttccctgccagatttaatttattacgatgactcactgtgatttcaactcccttgctgtctaccttgttatagttggcatacgtataataatatcctcccattgatggtggataatcgcctcccattgctgtcagaatatcataggtataattatagaatgcatcaaattccatacccagtaaaccattccacatggtaaagtcgaaacctgcattgtaagttaacgtgttttcccacgtcagagtaggatttgcaattacagatgcacgcagcgcctgcatgacttttccgttcagaattgtctggtacgcatttttgttaccgtccatcaggttataagtactaaggaatgcatacggactcacatcgtcattacccaacaaaccgatagatgcacgtattttcatatcatctagaaaagtcagatcggacataaagttttctttggatattctccacgctactgatgctgatgggaaaaatgcccaacgttttccacttacattgcccgcaaacttatacgaaccgtcatatcgtcctgtaaattctgccagatacttattgtcatagtcgtatttcaaacggaaaacgtaaccaatgctacgattggcatcactgtagccggaaataggggagtctgccggttgtccgaaactcaattccggaagttctgcaaaactcatattcttattatatccggagaaactgttttctttataatcacggatttccgcaagtaccatggcttcaacattatgcttaccgaaagaattcgcataattgatgcttccctggcctaccatttgacgggaactgaattgtccttcacctaaatttattccatttgcagttccacgaggatcatccgctttagtccaagtccagtctgtagtggaagtcggcattttattgatataagtagaataaggtgtattcaggtttttattatgtgaggtcttgtagtcataagctccggtaacctttacacttaatccttttacccaaggcagattatattgtaaagagaggttagtctgcaaatcaaagctattggtatgtttgtagccggattcataaatagctgctagcggactattcggtaagcttgtattattctgtgtagtagcggtataaagtccatcatatttttccggtaaatacggatgcatcatgatagtctggtgagcaacggataaccaaccttgttctcccaatgtggaattagaatctgtaccaccggaggcatatcccggagtttcacgttttcctacatttccggcaactcccaaacttaactggaaattcttggccagctgagtttcaatgttggttcttaagttgtaccgtctataagtaaagttatcaatattaccatcctgtcccaaatagccgacagacgtgaaataacgcattttgtcactaccaccctgtacggtgatgttatgcttctgattgatacctgtgccaaatactttatcaatataattgacattatcccacccatcagtaggatcgccgttcaacatcgcttccacatttgcttttgtgaataccggtgtatattgcttcatgtccgtaatacttccgttagccagcttatccatcatatcagccatattataataatatgcaaactggggaccattcataaactgcggaaagtttgcattcatagatgctcctattgaaccgttatatgtgattcttgactttccttcctgtcctctctttgttgtaacaatgataacaccacctgcgcccttcaaaccgtacacagccgcagaagctccatctttcaagacagatacactctcaatatcattaggatcaatgtcattgatggaacgaggcataccatctacaatataagtaacattgtaaatagaaccacgaacccgcaatactgcttggtcatcacccggttctccagagacttgaacagaagaaatgcccggcaaacgtccgcctaacaaacttgatacattggttgccggtgcctttaacagttcgtcgcctttgactgcagaaaccgctcctgtcagggattgtttctttgcagtaccataaccaacgacaatcacttcatccagagatgccacatcatccttcatcaccacattgatcgttttctgtccggcaacttttatatcttgttccgccatacctacatatgtgaaagacaatatatcttttgaagtcgcctgaatgctgtattttccattaacatctgtaactgtaccattagtagtcccctttactacaacacttacaccaggtagagattctcctgtctcatcagtaacagtaccttgcaccaaactctgtgcatgagcattgatagcacatgcaaaaagtgcgcatattgagaaaagaaatatcttcaatatgcgagagttttgcttaatttttgagttaaactctgtcatagaattaatttttagattattaataagattggttaacataataattcattgtttctatagctgttctaatactttccagcattgaaataatccccttggtacatggaaacatcctttccatttcccacctttgagtggcagcaatacttctccctgccgattcagatatccgtaccattccggatattccggatctttgaagtgcgaccatgtgtagtcatgcactttttcaaaccattccagacatttcctgtctccggtcagctgataacctttcagcagtgatatcagagattcaatatgcacccaccaaagtttctgatcccattccaattgctggggaggacaaccgttacggtccataaagtaatagatacctccatattgcttgtcccaaccatagtcgagcattgtcagggttacgtcttttgctttttctatcaatttcggacgattcaggcgtttgcccaaatccatgatgaaccacatcgcttcaatagcatgaccgggagtcacctggcgtccttcgaagcaatccaccagattaccgtccatatcgacattctcaacaatgatgccccccagctccggacgataaaagacatccatcacttcatggatacaggtttccatcgtctgttccagataaccgggatccagaagatgttcgatctccaaagccagattacagaggatcatcgggagagcgaagttcttcagattacgagtacccggatgaagcttgttccacttgcctttcggattatcaaccttagaaaggatgatttcaaaggtcttctttgctatgtccgcatactcctgatttcccgtagcaagactcagctgtccaaaggccatcgtggcgaaagtatatgagaaaatattgtatggttctaccagtggtctacccgaacggtcgagtgaaaagtaccagttataattcccgtcatgtccgtattttttcaagaattcaccaccctgaacggcacaatccagccattcctgtcgtttttccactttgttgtaaagcatggagaacatccatacctcacgtccctgcaaccagatgaacttatccgtatcgaaaaccttcccttcacggtccaggcagctgaaataaccgccaaactcaagatcttgggagtgctcgagccagaatggaaggacattgtccaacaattcatcccggtactgattcgctagtttcttaaaatccataatattgtttttattatagataggtatagggtacaccgaaggcggggaaacgtttcttgaatggccatgcagaaaaccgcctgcggcttctctatacttctcagttgttgttagtttactgttattaaggtctctttctttcttctactgttccgaccgggtccagtatctttcaatctcttccagtgactttcctgtggtctccggcacgagtttccatacgatgagcatatacggcacgcacatgactgcgaacaggaagaatgttccggcgggggtgagattctggagcatccagggggttaactgtccgatcaggtacgttcctatccacagggcgaatcctgcaatggacatcgccagtccgcgcaccttggtggggtacatctccgagaggagcacgaacaccacggcacagatggagacggcacagcagaatacatagaacaggaagaaaacgagcaggaagaggctggatactccccaggaatcaccgaagaggaagtaaatgccgatcagcaggagggagacaaccatccccgaaactccgtaatagaccagtttcttgcggccgaccctgtcgatgatcacaagagcaagaacggtggtcagagtgttgactagtcctacgagaacttggtaaaacaaagaatctcctcctgaaagtcctgcgttttcgaaaatggaagggccataataaagtacagcattcacacccatgaactgtcccaaaatagcaatgcatacaccaatgatgaccgctttaaaaattccgggtttcattaacatagcccattcagattttgtttcagacgtcaatacagatttcgtttcttttaattgacttgcagcctctgaaactgaattatatatcctttctaatatattgacagctttttcttctttacctcttacgatcagccaacgaggactctccggaataaagaagataatgatgaagaataacacagccggcaatgtttccattcccaacattcctcgccagacttcagtaacaaatatcttattcaaccagtccatacttaactgattaccactttcagcataagccagcaattgatagttaatcaaataagctcctaaaaatccaactgtcacagccaattgatataaagataccaaacgccctctatattgtgccacagccacttcagatatatacaaaggagaaacaatcgacacaacaccaataccaactccaccaataatacgatagactaccaattgggtgaagtctgcggagatcgcacaacctaaagccgatgtagaaaacagagtcgctgaaataatcatcgtcatttttcgtcccagcttatcactcaggataccggcaaaaagaacaccgacgatagaacctattaaagcacatcccacataccacccctgttgcaacgtatccagttgaaaaagttgagtaacctgagcgattgttccggatataacagcagtatcatatccgaacaaaaatcctcccaaagctgctacaacagaaaggaaaataagatagccaaagttaattgtagacttcatatcactcatttgatttcaaaatattctctgtatctatcatataaatgtccggcctgcaagtaggcagattgaggactcataaaatgagaaaattcgaaagtaatagccttatcataccctgcacgtttggcagcttccagcttcatccggagcttatcaaatttaatgggtagaaaacggataggcatatcacggtcaaaagactcggcgttggtccagcattgcataccatacttatctgctaattttttatttacagtaaagaacgcatccaactcatcataatcgatatgtccatcctgaaaagcacaagcatctaccacttcatgaattccatcaaaaatttcattccattctttttcgtgttgttgtacagaaaccgcatcttctcttgtcagtttccctgttcccataatagcctttttgccatcaatccacggagagataaaagtcgggagtccgttcgatacatctttacattgctttcccatagcacggaaagcatcaatagcccctttcgtggcacggctaatctcgccgctgatgtaccagcctccaaaacttttatacttctctccgtacatcttccaaacctcatcaatcacatacttgttatcctcaatctcccaacttaaatcacctgtatcccaataccgtcctgaatcatacaaaccaaaataaaatttcatgttatacttctccgccagacgcaaatacatatctaccaaatcaaccgacggcatataacatccttttttcagcaaataaggtgaagggtaagtcataaacttacgataaccggaacgaatcataatcactgtatcgataccgattcttttcatatgctgaaaatccagatcccattctttctcaccccagttctgatgaggaatatcatgagatatttcatccaaaaaagttcctgtaatttttaagccattatttttgggaacaatcaatttgctttccaaatcgccagccttgatcttcggggagagttcccctctcccctctccgtcagctgcaaataatgaaggggcaaccaaagcggaagctccggccaaagctgccttctttaagaaatctctacgattattagtttccatagttttatttttttgtttttacttggatatatgttaacctattgaatatacttaccagtgatatcgatctgttttttattgaaaggatccaatacctgatcaatcattacagccatctcccctctcaaaatattccgtttcaaatccggttcttgcattccgtatgctttccaaagcgcttgcggatcaacagtagtatgtagtttttccgtttctgctatcttctgaacaagttgaactgcctcctcaatacttaatttatccgctcctgtttttttgaattcatctttggcagccggatacacttcaaacagaccatccagttctgacgccagcaataccgtatccgctctcaaccaagtctgattggaccagtccacattcttaccgactcctttgagaatccccgtagaaccaatccgctgataagaagcaaacttcacatccgagacagggacatccagataaggaagcaaatatcctttagcatccaaaatagcattctgaacatcacgaacagaaacatcacttatcttctgattattcttcacagcaagtgcagccaaagctcctgccgcctgaccgatctgcagtacaaccggttgcaaacgagtcgttccattcataatattcgatacggaaatagatttctctgcaacaatcagcccgtctacctcctgaggaatcaatgtacctaacggcaacccatacgaagggatcggatgaaaatacagattaggcaactcttcataaccatgatagcgggtatggtgatgatctaccggataatcacccacagcaatacaagtacggtacagcttttcatcctgtgtatatggattgagtgcatgattcaagttaaagcggactaatccgtgaattcttctggactctctatgataagggataaaaggtaacttatcctctgtcggatattcatcatccgccaatccaagtgtattataccccagttcatgttgcaggaagtaaacaaaacacatcgtataatgtttcgcatattccaatgctttcacgcgttcttccggagtcatttcaatcagattaatataataatcattaccttctatcggccaattaatcatatatttatgattcggcaaccgcccgtaggtaatcatcatatctttagaccagacgcgatccggctctttaggagttatgcataccggactggcacaggcacaggcaaattctttaggatcgtatccttcaggttccggaatagtcacatccttaccataatcttttaatatggcaacataggtaatatcctgcacaatattattcttcttttccggagcaatatcctcgtgcgtgtcatctctgctttccataccaatatcgtacttcactccacacatttttgccacatcacccagttcggtggcatcaatcatgaccttcgcccgaaccgttttcacaccttgtccttccaccttcactttagcgacccactcatctcccgtcctttttacttcttcaaggcaagcctgtttccagacttttagattattttccgccgctaccatttcgtgaagaatcttatttccaactgacggttcaaacaatacgttacttacccaacccgtcttcaaagaatccagcccgccataataatcagacaatctattcttaaattctccccaaagtccggcaggcaatctgtaatttccatccacagcactcacaccggcagaagtcagcatcccacccagccaggtgctttcttcgagaatcagtgtattggctcccatacgagcagactggatgccggatgttacaccactggcacctccacctataataagtacatctaccttatcttcctctgagtgcatacaagaagagtatgatactaccagaaacagcccacagagtatttggaataagtttttcatcataatacgatttggttacggtacatcttaattaatatcacggtacaaatatagctatatttattaaataaacaatagataataaaatattttattaataaagttgatttttgcttctttattcattaataagactataaatatgaagctattcagataccagtacccttattaccttattatataagaagatttcaaataactatcaatgagagaattcactttctataaggaatcagcacagcatcatctcagattcaattctaattttttcgtcaagaaccttattagttaataaaaaaattaattatctttgtagatattacaaaatataagagacgtatgaaccaacaattcttgaaagaaatagaaatgggctctaaaaatgccctcgttaaaaagaggatcattacacattatatatataatggtagttccactattcccgatctttcaaaagaactagatctaagcgtgcccacagtcaccaagtttatcggtgaaatgtgtgaggacggatatatcaatgattacggaaaactggaaaccagcggtggacgccacccgaatctctatggactaaatccggaatccggttattttataggtgtagacatcaaaagatttgcagtcaatatcggactgatcaattttaaaggtgatatggtagagttaaaaatgaatatcccctataaatttgagaattcgatagaagggatgaacgagttgtgcaaactcattctcaacttcatcaaaaaacttcctatcaataaggagaagattttaaatatcaatgtaaatgtatcgggacgggtaaatccggaatccggatatagtttcagccagttcaattttgaggaacgcccgttggcggatgtcctgtcggaaaagctgggtcataaagtaaccattgacaacgacacccgtgccatgacttacggagaatatatgcaagggtgtgtaaaaggagaaaaagatattattttcgtcaacgtcagctggggagtcggcatcggaattattatcgacggcaaagtctacacaggaaaatccggtttctcgggagagttcggtcacgtcaatgcatacgacaatgaaatcatctgccattgcggcaaaaaagggtgtctggaaacagaagcatccggctctgcccttcatcgcattcttttggagcgtattaaaagcggagaaagctctattctttccacccgaatatccggtgaagaagaccccatcacgcttgacgaaatcatcacagccgtcaacaaggaagatctgctttgtattgaaattgttgaagaaatagggcaaaagctgggaaaacaaattgcaggattaatcaatatcttcaatccggaactggtcattataggcggaactttatctttaacgggagattatatcacccaacctatcaaaacagcggtacgtaagtattcactcaatctggtcaacaaagactctgccatcattacatccaaattgaaggataaagcaggtattgtaggcgcgtgtatgctggcacgcagcagaatgttcgaaagttaaactaccgttactttatgcaaagagttatggtaaaggaagattttaaattaaagctcaaaaaatattcagaatccttttgttttctcaaataaagctgtaattttgcacgccgtaaacgagaaacaaaccgccgctatagctcagttggtagagcaacgcattcgtaacgcgtaggtcgccagttcaagtctggctagcggctcttgacaataaagcgctaactacagaatagttagcgcttttcttattaacccccaaagcaaatcgcatgaaacgaggtaagagcaggagattatttaagaaaaagaagtcacattccaatcaaagattagggtgtatcatcgctatcatcgtacttattcccatttgttacgggctttatctgtattatcagcaatacagtgtccagcacagtagcaaaccgcagatagagacttccgtctccctccccactccatccggcaaagatttagagattcccgtttcattgattccccgtcaggagcagatcattcgtcataaaggctatacggtttcctacaataaagatctaaagattccgaattgggtttcttacgaactgacccgtcaggaaaccaaaggaaaagaaaagagaggtgacaacttcatcgccgatcctttagtaaaaggcgccattgcgaccaatgcggattatgcacgctcgggatatgacaaaggacatatggcaccagccgccgacatgaaatggagtccggatgtcatgaaagaatccttctatttcagcaatatgtgcccgcagcatcctcagctgaacagaagaggctggaaaaatctggaagaaaaaataagagactgggcggtagccgatagcgccattatcattatatgcggtcctatcatcgacaagccgtccaaaaccatcggaaaaaataaggtggcagtgcccgaacgattcttcaaagtaatcctctctccttttgtcaaaccggctcgtggcatcgggttcttattcaacaacagacaggcggtagagcctctttccacctatgcggtatcaattgacagcatcgagaaacttacccatatggacttcttctctcccctgcccgatgaaatagaaaatgcagtagaagccaatgccgattattaccagtggccacgctaatagttgacaaaatcagccgaatttcaactattcaccgttgaaaggaatcgctcctatccaaaatcttcctatctttgacgcaatttttaaagttacgtcacaagatgaaaaagaaaacaagaaatatcttattatccgttctgaccggagctctccttctttgcgccattgccggaggaacagtctattattatctctttgctcctcagtttcatccctccaaaaccgtctatgtatatgtagaccgggatgacacggcagattccatctacaataagatcagacaagccggtcatgtcaacaaattcaccggatttcaatggatggcaaaatatagaaaattcgaccagaatatacataccggacgttatgccatccgccccaacgaaaacgtataccatgtattcagccgcttcttcagaggttatcaggaaccgatgaatctcactatcggaagcgtacggacactagaccggctggcgcgaagcatcggcaagcaactgatgatcgactccgccgagatagcccgccaactattcgattccgcttttcagaccgaaatggggtatacgccggtcaccatgccctgtcttttcatccccgagacctatcaggtatattgggatatgagtgtcgacgacttcttcaaacgtatgcagacagaacacaaacgattctggaatgacgaacgtcttgcccaggcaaccgctatcggcatgacaccggaagaagtctgcaccctcgcctccattgttgaagaagaaaccaacaacaacgaagaaaagccgatggtagccggactatacatcaaccgcctgcacacaggtatgcccctgcaggcagaccctaccatcaagttcgctttacaggatttcgggctgcgacgcatcaccaatgagcatctgaaagtcaactcgccctacaacacttatatcaacagcggtttacctccgggacctatccgcatcccctctaaaaagggcttggacagtgtattaaactacacgaaacacaattacatttacatgtgtgcgaaagaagatttttcaggtactcacaatttcgcatccaattatgccgaccacatggcaaatgcaagaaaatattggaaagcacttaatgaaagaaagattttcaagtaattttgtgataaaacgagccaaaaaggctatctttgcccgatataataacaaactgtgatcaacactaataaaggaaatatatgagcaagcaactcttacttggcgatgaagccattgcacaagctgcactggatgccggactttcaggtgtatatgcctaccccggtactccttcaactgagattactgaatatatccaaatggcgcctataaccactgagcagaacatacataatcgttggtgtgccaacgaaaaaactgccatggaagccgcactgggtatgtcatttgtaggcaaacgcgccttagtgtgcatgaagcatgtaggcatgaatgtggctgcagactgtttcgtcaattctgccatcacgggtgtgaagggaggactgattgtgatagcggcagacgaccccagcatgcactcttcacagaatgaacaggacagccgcttctacggagacttctccctgataccgatgtacgagcccagcaaccaacaggaagcatacgacatggtatacaacggattcgaattctctgagaaaacaggcgaaccgatcttaatgcgtatggtcacccgcctcgcacactcccgttccggagtagagcgcaaagagcagaagccacagaacagcatttcattcagtgaagatccccgtcagtttatcctgttgccgggaaatgcccgcaaacgctataaagtattgcttgcccgccaggacgaattcatcaaagcttccgaggaatctccttacaacaaatacatagacggccctaacaaaaaactgggaatcgtcgcttgcggtatcggctacaattatctgatggaaaactatccggaaggttgtgaatacccggtacttaagatcggccagtatccattgcctaaaaagcaattgctgcaattggttgaatcctgcgacgagattctggtactggaagacggacagccattcgttgaaaaacatctgaaaggctatctgggcatgggtatcaaagtaaaaggacgtctggacggcacactgtcacaagacggagaattaaatccggactctgtagcacgcgcggtcggcaaagaaaacaaatcggaattcggcgtcccttctgtagtcgaaatgcgtcctcccgcactgtgtgaaggatgcggacaccgtgatatgtacgtcacactgacagaagtactcaaagaagaatatccttcccataaagtattcagcgacatcggttgctatacgctgggagccaacgctccgttcaacgccatcaattcatgcgtagacatgggagcttccatcacaatggcgaaaggtgcggccgacggaggtcttcatccgtccgtagctgtaatcggtgactctacatttactcactccggaatgacaggtttgctggattgcgtcaacgaaaatgccaatgtcgttattgtcatttcagacaatgagacaacagcaatgaccggtggtcaggactctgcgggcacaggacgtattgaatccatctgtatcggtttaggagtcgaccctgctcatatccgtgtcgttgttccattgaagaagaaccacgaggaaatgagacagatcatacgcgaagaaatcgaatacaatggcgtatccgttatcatcccgcgcagagagtgtattcaaacattagcacgcaaaaaaagaagtaagtaagccatgaaaaaagacattatattatcaggagtaggtggacagggtattttgtccatcgctacagttattggtaaagctgctttgaaagaaggactttacatgaagcaagcagaagtacacggaatgagccagcgtggcggagacgttcagtccaacctccgcatcagcgacaaaccgattgcttcggatctgataccatccggcaaatgcgaccttatcatttcgctcgaaccgatggaaggtctgcgctatctcccctatctcagtccggaaggatggctggtaaccaacgaaactccgtttgtcaacatccccaattatccggaagaagacaaagtaatggctgaaatcaacaaattgccgcataagatcgtactgaacgtggataaagtagccaaagaagtaggttctgcacgagttgccaatatcgttttgctgggcgcaaccattccattcctcggcatcgattacgagaaagtacaagacagtatccgcgaaatcttcctgcgcaaaggagaagctattgtcgaaatgaatcttaaagcactggctgccggcaaggaaattgcggaaaagctaatgcaataactatcacaatcatgagtacacaatactgggaagaagaaattgaaatcatgagtcgcgagaagttgcaggaactgcaacttcagcgactcaaaaaaacgattaacatagccgcaaactcaccttattacaaagaggttttcagcaaaaacggcatcaccggagatagtatccagtcactggacgacatccgcaaaattcctttcaccactaaatcggacatgcgtgccaactatcccttcgggctagtggccggcgacatgaaaagagacggtgtacgtatccactcttccagtggaactacaggaaaccctacagtcatcgtacattcacaacatgacctcgactcatgggcaaatctggtagcccgttgcctttacatggtggggatccgcaagacagatgtcttccagaacagctccggatatggaatgtttacaggtggattaggtttccaatatggtgcagaacgccttggctgccttaccgtacctgccgcagccggaaacagtaaacggcaaattaaattcatcagtgactttaagactaccgccttacacgccatcccaagctacgctatccgtcttgccgaagtatttcaggaagaaggtatcgacccgagagaaacaaccctgaaaaccttggtgatcggcgccgaaccgcatactgacgaacagcgccgtaaaatagaacggatgctcaatgtgaaagcatataatagtttcggtatgacggaaatgaacggccccggtgttgccttcgaatgccaggagcagaacggaatgcacttctgggaagattgctatctggtagaaatcatcgatcctgaaacaggagaacccgttcccgaaggagaaatcggtgaattggtactcactacacttgatcgtgaaatgatgccgcttatccgctaccgcacccgcgaccttacccgtatactacccggaaaatgtccgtgcggccgcacccatctccgcatcgaccggatcaagggacgcagcgacgatatgtttatcatcaagggagtcaacatcttccccatgcaagtcgaaaagattctggttcagttccccgaattaggcagcaattatctgattacgctggagacagtcaacaatcaggatgagatgatcgtcgaagtggaattaagtgatctttctacagacaactatatcgaactggaaaagatccgcagagatattatccgtcaattaaaagatgaaatactggttaccccgaaagtaaaactggtaaagaaagggtctctcccgcagagcgagggaaaagccgtcagagtgaaggacttaagagacaacaaataaatattcaaatgcccgatgtgctaatatgccaacccaatactgtatgatatcagtaacaaatggcatattagcacattatttaattatcagattataatgcaattactaaaaaaaagaattctgcaggacggaaaatgctacgaaggaggcatccttaaagtagatggttttatcaatcaccagatggatcctgtcctgatgaaatccatcggagtagaatttgtccgccgctttgcagccacaaacgtaaacaagatcatgactatcgaagcaagcggtatcgctcctgccatcatgacgggctatctcatggacttaccggttgtattcgccaaaaagaaatcacccaaaaccattcagaacgcactaagcactaccgtacactcgttcaccaaagaccgtgattatgaagtagtgatcagtgccgattttctgactccaaatgacaatgttctttttgttgatgatttccttgcctacggaaatgccgcattaggcattctcgacctcatagagcaatccggagcaaaattggtaggcatggggttcattatcgaaaaagccttccaaaatggacgtaaaatactggaagagaaaggtgtcagagtagaaagccttgccataatcgaagacttatccaactgctgtattaaaataaaagatcaataagctgagtcggggttaaaataatgccccttgccttttgtctttttaccatattgcaccgcatgctgagggcacacatgataacatgccaggcaggcggtgcaattctttccccaaaccggtcttctttccttcatcgttatattccctaccggacaacttttttcacagcgcttgcacccgatgcactcactcgttgcatggaaaggtttgggagacatctgataacgaacaaataacggattgatgatcctcgtcttgataaaaggcaaactcccctccttgcatgcaaagacagtttctctcccggttatcagtctactgactttttcaagagccggaaccgcttctgtcagttttttcttttccagttccttgctatccacatcaaatccggggaacaacacatagttattgggcataattacagaaaagcccgcattacatctccatcccctcgcagccaatgccttttccatcacctgccgggtcagccccgtatcgtctccacacgaacacacaaagaacagatattgctgctgataccccttcagaaccaacttccgaataaactcctgtacaatcacgggaggcgcccacgaatagaccggaaagacaaaaccgatcttctcatcctcccgcaaagagaactcccatgtgtcattcttccatgcgtccgggataaaaaacaaatcttcctgttgttctttagaaagctgattagcaatccatttagagttacctgtacctgagaaataaaatatcatagaagagtatataaaaaagccgcatcgacgatgtgatgaaactctgatagaacaagatttgagcgctcgccctctttgtaatccaccggcttaaagctgtcccgaaggatgtggcccgccattgaagaacgaagctttctcggtgcatcagattaatttgaagagtttcccgatccagtcgatacggctaatatttttctatcacaaatgtaataagattctctgagaatagcaagaaaaagaaagaatttgttcgtccactaacattttttttcatcctttctctccgcctaacaaaagaaaagtgccagttatcggatcgataactgacactttgtaaatcctaaactattgaaacttaagcagcttttgctttagcaactacagctttgaaagcttccggatgattcatagctaaatcagccaaaaccttacgatttatttcaataccggctttgtgcaaaccgcccatcaatttagaataagacattccttcaagacgtgcagcagcattgatacgttgtatccaaagagcgcggaagtttcttttcttatttctacggtcacggaacgcgtaagtcaaacccttttcccaggtgtttttggctacggtccatacattttttcttgcaccaaagtaacctctggttaatttcaaaattttctttcttcttgcttttgaagcaacatgatttactgatcttggcatagttttactttttttgaatgttagcgccgttacttcacgcaacgaacttcaggctaaagcattcggttaatactttaataatactttgtacgcttttgattacttcattgctaagagttccttaacctggcttacatttgttgtatcaacagttgtagagtagcacagatttctttttctctttttcgatttcttagtcaaaatgtgactgtgaaaagcgtgctttcttttgattttacctgttccggtaagggtaaacctttttttagaaccggagttagtcttcatctttggcatcttacttgtttttaaaattattaaatatataatggtgacgcactatacctgcgcgccacgcattcattcttttttattcttcctcgcccgcttccggcttttcagccttctgtccctgagttaccggtttggaagccgccggttttttaggcatttcctttttcttcggagaaagctggattgtcatacgcttaccttcaagtaccggcatctgatccacctttgcaaaatcttcaagatcgttggcaaaacgaagcaataacacttcaccttgttccttgaaaaggatggaacgccccttaaagaatacatatgccttcactttatccccgtcttccaggaatcctctggcatgtttcagcttaaagttgtaatcatgatcgtcagtctgcggtccgaaacgaatttcctttacgttcacttttacctgcttcgctttctgctccttctggcgtttctttaattgataaagaagtttagagtaatcaataatacgacaaacaggaggttgagcattgggggaaatttcaactagatccagctctttctcttcagccattttcaaggcctgaaagataggatatactttcggttcaatctcgtcgcccacgatgcggacttctttggcacgaatctgttcattgattctatattgcccttttaaagtgtcattcttcattaaaaacgtttacttcctagtttgatttttttattgttctactaaatatttatcatgaaacggctgcaaagttaccatttatttatcatattctgaacttcttcgttcaaaattttagcaaattcttcatatttcatggttcctttgtcgccttccccttgtctgcgaacagaaacttcaccattttcagcttctttttcacccacaatcaacatataaggaatgcgtttcatttcattatcacggatcttgcggccgatcttttcattacgatcatccacaatagcacggatttcatgcattttcagatacatcttcacttgctctgcatactcattgaacttttcactgatcggcaggatagctacctgatccggagtcagccacaacgggaacttaccggcagtgtgttcgatcaatacagccacaaaacgctccattgatccgaatggtgcacggtgaatcatcaccggacggtgcttctggttgtcagagcccatatattccagttcaaaacgttccggcaagttatagtctacctgaatggttcccaactgccaacggcggccgatggcatctttcaccataaagtcgagcttgggaccatagaaagcagcttcaccgtactcaatcttagccggcaggcctttttcctcgcaagcctcgataatcgcctgttcagctttctcccagttgtcatcgctaccgatgtatttttcacggttcactttatcacggagtgatatctgagcctcgaaattctggaaattcatcgaacggaacacgatagaaatgatatccatcacacggaggaactcatctttcacctgatccggacgacagaaaatatgtgcgtcatcctgagtaaagctgcgtacacgagttaaaccgtgaagctcaccactttgttcataacggcaaaccgtaccgaattctgcaatacgcaacggaaggtccttgtatgaacgcggaaaattcttatatatctcgcagtgatgcggacagttcatcggtttcaggaaatactcctctccttcttccggagtatggatcggctggaacgcatccttaccgtattttgcatagtgaccggaagtcacatacagcaacttattaccgataggcggagtaattacttcctggtagtcatagcgggtctggatacgacgcaagaactcttgcagacgcaaacgcagtgcagtacctttcggcaaccacatcggaagtcccttacctactgtttcagagaacatgaacaactgcatttccttaccgatcttacggtggtcacgtttcttggcttcttccagcaacaccagatattcatccagcattttctttttcgggaatgtgataccatagatacgggtcagcatcttacggtcttcgtgaccgcgccagtaagcaccggcaacagttgtcagcttgatagccttgatcggcgcagtcgtcatcaagtgaggaccacggcaaaggtcagtaaacgcaccctgggtgtaggtagtaatatgtccgtcttccagttctgagatcaattcacatttatacgtttcgccacggtcgccaaacattttcagagcgtccgtcttcgaaatactttctctgactaccgcttctttctttgccgacaattcaagcatctttgcttcgatggcaggcagatcactttctttaatcacagcttctcccggatccacatcatagtagaaaccgttttcgatagccggtccgataccaaactggatacccggataaagttcctgcaaagcttcagccagcaagtgggcgcttgtgtgccaaaatgcatgtttgccttcttcatcgtcccatttgtaaagtacgaaatcagcatcttcattaataggacgtcctaaatcataagtctcaccgttcacgccacatgcaagtacatcctgtgccaagcgcgaactgatactttctgcaatctgtaaaccgttcactccttcgttatactcacgaacggagccatcgggaaatgttatctttatcataatatgatgatgttatattttcataatgagaacgcaaaagtaacgaaatcttttgagttttctattttttatcaaaaaaatgttattctgtctgatccgtgaaacgcttgatcacgttgtaagcagaaacaactcctagttcaccggccttgctcaaatctgagattcccgccttattattacccaggaaaatatgcgtaagtccccggttgaaataagcgtcagcaaagtccggagacagctgaatcgccttatcgtaatcgacaatcgcagccctgtaatctttcagcatagccgccacattggcacggttataataagcgtaaacgaagtccggagccagagttatcaccttatccaggtcctttctgacaacttcataatccaccgcactcacttccttgacagcagcgccactcggcatatccgcttcggcagcctgttcagccttctgatattccagttgtttgcaacgaatcagtgcacgcatgaaataggccgggaagaaatctccgtccagcaatatcgcctgagtcaggtcggcaaccgcactggagaaatcctgtaccagataaaagtcaatggcacgggcaaaacgcttcggagcactcttgtcatcgtccacaatagccgatgtatgcgcatcaatcagggcaaaatggaatttcacctgttcttccgtcaacggggcctccatatttgtaatacggatacgcttcggaagtacattcgacagattcaggtcttcaataaacttatggaaattcaccgaacgcttcacttcgctcgacttttcataataagtcaaggcaaacatcggttccagttttatgttcacattcttatcctgtacgcgtccgcgataatcacttgtatagcgttgatccgcttcagaatcatcggcaatcacaatcttgcgatagttgttcatgttcttgtcagacttcttacgagtttttccttcctcgctttcgtcaccgttctcgccgctctggttttctttatccttattctgattctgggcaacgtctttgttcgtccctccattctgcttgtcaagctgagccttcaacagtttgaagtcatcctgttcggcccccttcttgtcgccgatcttcttgcgggcttccgcacgatgataatatcctgcgaggaagttcggatactggtcgataactgtcgtatagtctttgatagcaccccggtaatctcccgtctgagcacgaagcaacgcacggttaaagatagccatcatattatcaggttccatctgaatcacaaaatcgaagtcctcgatagcgcggttgtcatccccgacacgggcacgaagcaaaccacggttataatgcccgataaagttattgggatcaatatccaaagccaggtcataatcgctcatagcacccctcagattattctgatggaatctggccaaagcacggtttatataattacccgcgttcttcgcgctcagatgaatcgcacggtccagatccgattccgcttctgcatagttggactgctgcaagcggacaatagcccttgccgaccatgcgtccggatcatacttatccagttcgagagccgtattaaagtccttcagcgccgcaaccgtatccttctgctgcaaagaaacctctcccctcatcagataagcacgtgtatagcgcggagaaactttcagcaagctctccaaatcctccttggctgcgtcataatcctttttctgaatatgagacaaggtcagattgtgccacaaggtgatgttttccggatcataatgcaatgctttctgataatcctcaatcgccccgtcgaatttactctgacgaatccgtgccagtccacgaacctgatatgcacctactacaaacggattccgtttgatagcctcgtcacaatccgcttccgctccttgataatcctccaggttcacctttgccagcgccctgaaaaaataaggctcatacaaatatggcttcgcattaattacctggttgaaatactgaatagaaagcacgtagtcctcaaaatacagcgcattgcgggcaatagtcatcacccgctccgtattaatctgagcacaaaccagtgtggggaacagcaataaaactgttagtattcttttaatcattgatattttatgcttgtaaacgaaacaaaaataatgcttttcgcttacttaacagggatataaacgttttttatctttatttcacctgtttcatcttatatgaactacgcgcttttcctttcagcatcgtatttaattttcctcttatcatttgtttgcgcaacggcgaaaggtggtcgataaacatctttccgtccagatggtcgaactcatgctgcatcacccttgccagatagccttccaccacttcatcatgctctacaaagttctcgtccatgtatttcacacggatcttatctcctcttttcacagactcatgaatgccgggcagactcagacagccttcttccatactgacttcctccccacccacttcgatgatatgaggattgatataagctttattaaaatccttaaattccggatagtcttccgaaagcgggtctaatgtaatcgtaacgacacggataggcaagccgatctgtggagcagccagtcccacgccatcggcgtgcaccattgtttcaaacatattcgcgatcagctctttcaggttcggatactctggggttatgtcctctgccacctttctcaaaacaggctggccatatacataaattggtaaaatcatactttatactctactaaaaaattaaattattctctgtcttattattaaaaacgtttactctccaaatatgtttgcagaataatagtggcacttatctcatccaccaatgctttgttttgccggtctttctttttcagtccggcttccagcatcgtacggtgtgcgagaacagatgtgaaacgttcgtccacatattctacaggaagttccgggaaacgtttcttcaatgaacgaacaaagggttcgatgttcttcatattttccgaagcttcattattcatctgcttgggcaatcctataataatccgctctaccggttcttttgccacatacccaccgataaagttcagaagttcatgcgtgggtacagttgtcaacccgtttgcaatcagttgcaacgtatcgctcacagctatccctgtgcgcttccttccataatctatagctactattctgctcatatggggtacaaaaatacaaaaaagacgcttcccgcgaaaggaaacgtctcttttattctattatttcaactgtggattattcttccacgatagcaacacggctcaacttagcgtcatcgtagaacatattgcctacaccacccttgtaatcaaccttcagttgagaagcaggtacaccgaattcgttcaccatcaggtcacgtacagcttcagctctcttcttacttaacttcatgttgtactcagcagaaccagtacccttgtcagcatatcctgtaacagtaaatgtcttttccggattagctttgatacccttagccattgcttcgatgttcatgtactctctcttgctgatgttgctcttaccaatgttgaatacaacaaccagacgtggaacgaatccgccttctttcttaacgattacttccggcttcttgttgcgtgcttcaaccaagtcacgtttcagagattcgttttcacccttcagagagttcagtctgtttctcatgtcgtccaactggctttccggtaccatcggtacagtaggaacagcgttgaatccgcgttttttgaacttgtaagttacacctacagttacaccggccataccttctttagaagttccgccgaatgcatccttcatcaaaaggccacgcaattcaaggttgatatcccaagcatccgatacacggaagcggttgatcaaaccggcattgatacctaagttttgttgatgaggttctgaccaagaaagagccacacctgcacctacgtaaggaatgaatgaataaagacgatcctcgttgtaaccgcagaacatgttagaaaggttgaagagaacatcaccatggaagttagccatgttccatttctgcttgtagtaaccgttagaatacttgccaccttttgtatacaagtcattagcgctaggagcagctcccttagcttgaagaccgttgtatgcgacacgcaatccgatacccggagtaaaccatttacctacggcaatatcaagtgccggagcaatgcgttttccgaaatccgctttaccgtcgttgtcgccaaagtacatttgaccaccaacgccaccactaatgaaccaattggccccaaaacgattagtctctacagtgtaggctttaccttctgtttttcctttttcctgagcagacaggcacacagaagcccctaccattaaaataaacaataaaccctttttcatctcaatttattttagtaaataatataatgcagtttgtgttacgctataaccacaactctacaggctctaaatcttaaacaaagagatataaatctctaccctttttctttaaatttagtgcaaatatagatatttattgtaatacacacaaaaaaactcgtaaaaaaacatttcttcgtgatatttatatgggatgataaaagtgttggatagcctacaaagggtatagccaacatttttgaaagaaaaataaaagcaaaaaaataaccaatgataatctatatcattggttatcccttattttttccgctaccttaattaatataccagttttacattatcaatccacaatgaatttccgggtgaaccgacgtaagctccgccatgactggatgtgaactggagatacagatgagtcggctcatcattttcatccccccatgccacttcgtggataggcacgctttcacctttgctgttgactgtatagttctcagtcacctgcagacgcatcatgtgaggtttatattcgggacggctggtaatgtctccatacataatttcatacgtggcattattcttccagtcggtagagtgatagtaataagtcaccaacgttccgatacgcttggcataaacatttccgttggcatcctcccagcgtttctgcaaaaataaaatagcagccggataatccttgcctgctacatctgtaattttactgaaaccggtagcacgtatacgtttttccctgtcggacatcttcactttatagtcaaactgaagggcaaccggcttcttggtaaacggaatccccgtctgaagcatcttctgcgggttcttggtacccttgatcggttcgtgcacagatcccgtaaagatagagccggcagccaatacggttatattgacaagccccagtaccttcacactctccatacgcgtatccaggcgtgcacagtaaccgtctccccgtttctccggaaaaaccgacgtatttgtcttggtaatacctgccactttcgccatcacattcgaagtcgcccacggtgagccacccatattcttatacacctgatctcccttaattacagtcgtcggaccaatctcatacacattcttcgtgttccctccgataatccccgactcttttatctggcggtccacccattggtccatatccccgaaggggaccatctccactttatgctgcgccatcaaagacaaggaagaaaaaaatgcaacgaagcctgtcagaaacaggcgatgaaccattttcttaatcatcaatacttatcctttcttttataaattatagttccattgtttcaaagcaaaatcccagttttcctctaccaatcgaatcgtccggtcatcatatttatacttattcttcttatatcccttcttgccgccgacatatttttcgatatctccttgtgcttcggcgaagccggggatagaaagtgacttataaatattctccgtcattcccatcgcatccgcttcaaagtcttcaaacttcacttcgatcagattgccttccggaatgaatttcttatccgattcatacttatgatacagctttgcataaatagaaaggatattctcctccaattgttcattgctgacatcctccagtttcagaggctggattgtatttgtaaagaaactgcgtgtagattcaaataccgtatacggattacgcatcaggtagataaacttggcgttcgggaacattttcaccaattctttcaccctgcccgtatgaggagggttcttgctgaggaattgcgtacccttggtgttccacaaagaaatcttgatcaatttcgtgaatacctcttcaaacactttcagttctttgtccgtgatatcatcaaacagcagatacttgtccgcatattcctgttgatatttcggcaggaaccagaaattataataggtatacggcatcatgttcgacaatgcaaactcttcctcctgcggaagatccactgccagctccatattatccgtcggacgcttgtccggcatcagccagctcatattcttcttgaagaaaggctgtccccacatcatcagatgcgggaatacggtctgataagttgtgttatacccaaaatgcttgtcgcaggagaacacgttatgtacaaaagtagttccactccgccagtgtcccagaatgaataccggatcatgttccagcggctgattggccaacaacttttcgtagcgtttatcctgcaatgcagccaacggagaaagcaggcggcacaccgctttcgtcaaccggtacttgcctttataagcagcatcaatatcacggccggcagtgattgccttaaacgttttccagtcggcacctaccaacgtattaatcggaagtttattaaattcaagtaatcccatcgttctacattttatttaatcacttttatggagagtccctggcgttccagttccttcacgactttttctatggcggcgtgatgttccggggcaatgtccagtttcgacaaatccagtacggggatgtcatccgtggcagccatatctttcatttccacccggtcgataatcatacctacggcagaggtattattcgtaatcggatcgatcaggataaaagaaccgcaagatttattctttttataaggatcgaagaaaagctccttggcagtagtcagcacaacacgggcgatctgattgagctgcaatggcaaattgtcctttgtcagttgtccattgtcaatggaaagatgctccatcgtgttgacatccactttatatttgatcgcgtcgatgcgggtacggctcaaattggtagtctgcttgataaagaacgatttattgatgtccatcggttcttcatccatccataccatcatcgcttcgaagttgcggtcaacgatcggcaagttgtccggatgcaccagcatttcaccacgggatacgtcgatttcgtcttccaacgtcagtgtaaccgactgcggcgggaaagcgtaatccagttcgccgtcgtatgtcacgatactcttcaccttggaagtctttccggaaggcaatgccatcactgtatctcccttgcggacaatacccgatgccactttaccgcagaaaccacggaagtcaaggttcgggcgcagcacatactgcacagggaaacggaaatccgtgaagttatgatcattatcgatatgaaccgtttcgaggaagtccagcaaagagattcctttataccatggtgtgcgttcggacttatccacaacgttgtcaccgtccaaagcagaaagaggaatacagttcacatccggaatacccagcggttctacgaatttcttgtattccgatacaatctcgtcgaaccgttcctcggagaagtccaccaggtccatcttattgactgccagcaccacgtgcttgatgcccaacagagataccagaaaagtatgacgacgggtctgggtaatcacacccgtacgggcgtctaccaagataattgccagattggccgtagagccaccggtaatcatattacgtgtatactgttcgtgtcccggagtatccgcaatgataaacttacggccgttggtagagaagtagcggtaagccacgtcaatcgtaattccctgctcacgctccgctttcaagccatcgagcaacaaagcatagtctatatgttcgcctgcattacctacacgcttactgtcacgttccaatgcatccagctgatcttcgtacagtttcttactgtcaaacaacagacgtccgatcaaagtcgattttccgtcatccaccgaaccggcagtcaacagtctcagcaagtctttctgttcgtctttatccagaaaggcctttatatccagcttattatccatttccaacttttagttttttaatcattcatttttaattgcttaaaaatacccttcacgtttcttctgctccatgctgccttcctggtcaaagtcgatcacacgggtagtacgttcgctcttggtagtcgtcatcatctcttccacgatctcttcgatggtagccgcaccgctctctactgcgcccgtcaacggccagcagcccagagtacggaaacgcaccatcttcatttcgatctgatcacgatatttttccggcagacggtcgtcatccgccatgatgatattaccatccagattgatcacaggacgttccttggcataatacagcggaacgatcggaatattctccagacggatatactgccagatatccagctccgtccagttgctgatcgggaacacacggatactctcacctttgtgtacacgggcgttgtagatatcccacaattcaggacgctggttcttcgggtcccactggtggaatttatcacggaaagagaagatacgctccttggcacgtgacttttcttcatcccggcgcgcgccgccgaatgcagcgtcaaatttatatttatccagcgcatgcagcaatgcctgagtcttcatcaggtccgtatgtaccttgcttccatgcgtgaaaggtcctacccctgcatgaaacgcttccatattactttccacaatcaggttccagccatgtttcttggcatattcgtcgcggaactggatcatttccttaaacttccacttcgaatcgatatgcatcaacgggaagggaacttttcccggataaaacgctttttcagccaagcgcaccatcaccgaagaatcttttccgatgctgtacagcatcaccggattctcaaattccgccgccacctcgcggatgatatgaattgactcggcttcgagttctttcaaatggctcagtttatattcttccatcttttttgaaatttcttcatttatttcttttctattttcggcaacaccatctccagcaggcggttgaccgattcttccagactcaacttagaagtatccaatgccaaggccggatgttcgggcacctcaaacggtgcggaaattccggtgaaattctgaatttctcccctacgcgctttggcgtacagtcctttcacatcccgcttttcacactcttccagcggggtgcttacgaaaacttccagaaaatcatcctttccgataatattcgccgccatttcacggatatcattattgggactgataaatgccgcaatcgtaatgatgccgctgtccagaaacaacttggatacttcggcgatacgacggatattctctacacggtcggtttcggagaagcccagattattgttgataccgctgcggatattgtctccatccagaatacggcaaagcagtccgcgcttatggagttcacgttccaatgcaatcgcgatcgtacttttacctgatccgctcagacctgtaaaccagatcatcacgctatgctgtcccagaagttcttctttgtcctcccgcgtcatcatgcggtcaaaaatcggatatatatgatttttttcttccatttatagaatatgtttattaaaagttccagatcaacgggatcaggatcacagagattaagaaagtgatgatattgagcggcagaccgatacggacaaaatccgtaaacttatagttgccgataccttgcacaatcaaattagtctgataaccgatcggtgtggaaaagctggcagacgcagccatacagatcacgacaaagaaaggtgtcggacttacgcccaactgcgccgagatggacagtgccaacgggaatgccagagccgcagccgcattgttcgtgatcagttccgtaaacaaattcgtgatgacaaacaatatagcaagtaatacatgcggtccgtaatcgtcactcaaaccgatgataaatcctgccacacaatcggccacaccggagttcaccatagccttgctgatggcaaatgcgcaggcaatcgtaatcagaatatcccacgaaatatatttggtatacttacgggcggggaaaatattggtccacgccatgataatagtagtaatgcagacaaagaaaaacatatccagcttgatatcgggaaacatctctttggttgccggcagttcgcccaccgtagcaccgacaatcatcagtaccagcaagattagcgccaaccagcgcttcttctttcccgaagtatccggatcattgccgttggtaagcagcacgaataccgaagattctccccaagtcgggataaacgtatcatccgccatcaccacaagcgtatcaccctcacgaagcactacatcctccagatgatcgacatagcgctgaccgttacgtgttttgatctctttcacttccgcaccatagtgacgctggaaattgaaatcactcagtttcttgttgataccggggaaacgggctcccaatacagcttctacacgatgcagcttctctccttcctccacttcttcatcgggcacagccgtatccggacgtgcatcgggcaagagccgtttggagaaaatgaaaagatatatgataccggcaatggcaataaagatgccgacctttcccagttcgaacatggtgaagccttcatagccggcttccagaatcataccatgcactaccagattggtagaagtgccgatcagcgtacagataccgccgaggatagtcacataagaaaggggaatcaggaacttggtggccggaagttttaccgatttcgcccaatgcttgatgatcggggcaaagatgactaccaccggagtattattcagaaaggcagaaatgaatgcaacagacggcaggatacgcagctgcgctttaaacaccgtcgtcttcccctgcggaagcagtttcttgatcacttgccctaatgtacccgactgacggataccttcactaaccaggaataacaaggcgacggtaatcattcctttattactgaaaccttcaagcatttccttcggagtcagaatgccgacgcacagaaataaaaccactaccgaaaagagcaccatgcccggccgcatcttatccgcgatcagggcagccatcattcctaataaggataatagtacaaatacaatttcaaatgtcatataaacattaattagcgttctctttttgcttcaacgataaaccacggattcagcagatcctctttgttatatcgcaaaggttcctccttccctgcctgatatacttccatccctgcggcacgggctatcgcatgtccggcagccgtatcccattccatcgtcggagcaaaacgcggatagacatccgcctttccttcggcaaccagacagattttaatagaacttccgcttgatatcagttccacattgccgtgtttcttttttaagtctgcaatatatgtttcagtttcaggcgtcaggtgtgaacgggaagcgacagcaataaaatggtcgcgcgcatccgccaatggcatccgttccgatttctcaatcatctgctgtaaggtcactccctcgtcttccagaccgacaatgccggaacacttataggcacctgtcccctccactgcaaaataaagttctttttttacaggcacgtaaataacacccattacaggtacagcgttctgcaccaaagctatatttaccgtaaattctccgttacgcttgatgaactccttcgttccgtccagcgggtctacaatccataaagtatcccagcctcgccgcactgcatagtccatatgctttccttcttcactaagaaccggaaaaggagtttcattcaaaatggccacaatcgcctcgtgggctttcctgtctgctatcgttaagggagagttatccgccttcctctctatttcaaaatccgacttcggatcttcatagatagaaaggattttttcacccgctttcaacgctgcatcgatagcagccattacatatttctgtttcatattgacaaaagtaaaaactttatttacgaaaaaagtttcccacctgctatttataacttcttttagtagaatgataaaaatttctaaaaaacgaatttacaatgtgtaacaaaaaagcagtaacttcccagttaccgccttcttatttcgggaaaacaggttatccatcccgatatatattaccaaaaagaaatcaataaatacgatacagcaaccaagctccctggaagtctgtacgactcgggtatttagccttgaatgcgtcacgtgcatcgacagcagccgctttgtcagcgaatgagcttacaatcacacggtacattgctttttccgcattgaatgcgattgttgcgttgtaaccttgtccgtccaaccagtctttcaagccttcagcattcgctttcacaccgaagctgcctactactacgctgtaatccttcaatccgtcggtaccggaaacgactgtcaccttttcctgacgaacgccggttgtatctgtagccttaggtgttgtcacaggagctgcaacaaccggagtcacttctaccggagcttccacctgcggttctgccaattcttgctgttttgctttttcgtaagcttttttataggcgctttcactggatttacaagatgcaaacgcaagcaccatgcatactcccattcctaatacgaccaattttttcatatccaatattctgtatttaattaataattcaataatcttgttcgttcacatttagttttcgggcaacaaaataatagaaattttatcatccggcaaagaaaatgagcgaaaaaacgtctattctgccttcttcttataagaaatagtgcccgttgcctgataagtcggcatcaaaagcacctctgcaatctgaatatgcgcaggagccgaggcagcataatataccgtttcggcaatatcgtctccggtcagcgggcggattcccttgtaaaaattgtcagccgcctgcttgtcaccacggtaacggaccactgtaaagtttgtttccaccatgcccggtttgatattcgtcacccgcagcggcgtatccaccaagtctatccgaagtccgtccgaaagtgccttcacagcagctttggtggcgcagtaaacactgcctccgggataggcggcatctccagcaatagaacctatattaataatgtgtccgcatccccgttccaccatgcccggaactaccagacgtgtcatggcgagcaaacctcttatattcgtatcgatcatgatatcccactcgtccagactaccttcgaactctttgtccactccgatcaccagtccggcattgttaatcaatacatcaatcgatttccattcttccggcaacgcttccagtgcggcggcagcctgtttccggtcgcgaacatcaaaaggcaacacacagacctgtattccatactctttttccagttcagccttcagttcttccagcttcgacactgtacgggcattcaaaatcaggttccatccttccttagcaaatttacgggcgcatccttcgccaattccgctgctcgctccggttataaaaacaatcttcgctttcattatgttttgaattacaatattgaatgacaaaagtacgccttaagtctcatttgttagtccaaaagtctagttaaataagattaaaccataaaagaaatcaagaatgataaaaaggaagtactttttttctgtttttgcgaacaacctttggagaaaaatgttatatttgttgtatcataatcattttaaacagtataaattatgaaaggattaaatgtattagcagcttttctgggtggtgcagccgtaggtgcagcccttggtattttgtttgctcctgaaaagggagaagatacccgtaataagatcgcagaaattcttcgtaaaaaaggaatcaagctgaaccgcaacgaaatggaaaatctcgttgacgaaatcgcagctgaaattaaaggagaaataggagaataagtaagtaaaggactaaaacagagcgaccatgtttgcagacgataaaagtattgagaactttcaacagttgttttttgagttcaaaaagtatctggaacttcaaaaagaatacaccaagttagagttgacggagaagctgaccatacttctttcaacgttaatcatgattgtaatacttatcatccttggcatggtagccctgttttatctgttatttgccttggcttatgtattggaacctctggtgggcggacttatggcaagcttcgctatcattgccggcatcaatatactgatcatggctttagtcattattttccgcaaacagcttatcatctccccgatggtaaacttcctcgctaacttgtttttaaccgattcaaaataaatgaagttatgagtgcgcaaacacctgccaaaattacattagaagagatcacccaacgcaaaaagaagctcttgaatgaaattcaggctcaaaaacgagctatgacggccaccacccgcgaaatattctcgcctcttgcacccgccgccaacaaagcggattcgctcatgcgttcgttcaataccggcatggccatctttgacggagtagttttgggtatcaagatcatgaaaaaaatgcggacgtactttagaagactaagatagcaatccgggtatgacaagaaggatcagacccctaccccgtcccatctcatcactaccacccattctgccggctgtccgtttccgtaaagccgatgtggaatcgtaccgatcactaaatcacaatgggctgcaaatacattcttcaattccttcagcagtgcattcaacagaatttccagatgtatctcatccatgatacagctgacgacacgcacgtactgataaacgtgtaaatccttcccctgccgcatggcactcacatcccttccggagatatgcaactcatcttccagaaaagaatacgaaatcgatttgtcgatattcatcaggttcactaccatacttcccaaaaattcataaggtccatgattttcttttgtcatgtttactctttgtttaaaatttaataaaaaatagatatatatttggttattcaatctgtttcaacctatgaaacaagttctaattccccctcctttacctttgcacccgctatcccgatagtgggatagacaatcataaaacatcaaaatcaaatgcaagtactcgaagaaattaaagtttccgtttacgaaaatgtgtattccaaaaagcctaaaatcatgtctttcctcgaagtcatctttatgtgtattcatccggtttatgcttccatcatccaatccatccggcggtatcatcaggaaggcgaccatgaagccgcccaaaaactaaaaagccagctcccctgcttcactcctgccggcaccttcgacggagcgcatgccatccgaaatttccagttgcccagtcacattatcggactcgactacgaccacgttcccaatcggctggagatcatccgtctttgcgctgccgaccctcataccgtagctgctctggaaagccctacggacggcgtgaaaatcttcgcctatgtggaaggtatcgaaggccgtcaccgggaagggcagttactggttagccgttactacgaccagctgaccggcctcaccagcgatcccgcctgtaaagacgaaagccgcctgtgctatttcacctattcaccggacggatacgtagccagtctctatcagtcattcgttctggaagcagctgtggaaacacaaccgttccagccgacagcagaaaacctcccctctcctccgctacctgcaaaagcaaacgaaacctccgagaacttctcggaagaggaagtcagcttgttcctttcgtcctacattttcttaaatccattgaccgccgggcaacgacacaccaatctgtttaaactcgcctgcgaagcttgccggagaagatattcgcaagaaagcatattacgcgggattacggtttattttgagcactccgactttcccgcacaggaaatcaggagcatcctacaatctggttaccaaaaagttacctctactccatccgtctccgcctctccgctttgctcttctcttcataaggacaaaatgacaaaagtgacatatagcccatccgaaaacatctatgaagcagatgaagcgtattggcaaggcgaagaattcagaaaagaaacgccctgttttcccaaaagcgtgtacaaatatctgcccgatctgctgaacgaatgtatcctcgaagaggaaggtgatcgtgaacaggatctttcctttctctccaacctcaccgcattgagttccgtactgcccggcacattcggcatctataatcacaaaaagtattctccccatttctacagtttcggcattgcccccgccgggagcaacaagagcattgcgcaaacaggacgttatctgctggaagaggtccacgactggatactttccaatagcgaacttcagcagaaaatttataaccataagtacacccaatggaaactggactgtacttataagaaaaaggcacatgaagagtgtcccgaagagccggaaaaaccagcttacaaaatgctttttctccctgccactaccagctacagccgtatgcagatccaaatgcgggacaacggtccgcaaggaagcatcatattcgataccgaggcgcagacgctggctacagccaatcatctggattgcggtaactttgacgatatgctccgcaaggcattcgagcatgaaaatatcgattccgctttcaagatcaatggcttaacccccatttatatccgttttcccatgcttgccatgttcctcaccggcaccccgagtcagatggcttcactgatagagacttcggaaaaaggacttccgagccgtatcatgctctacactttccgcagcattccgaagtggaagcccatgggagatgacagtatctcgctcgaagagtctttcaagccgctggcacatcgtgtcttcgagctttatcatttctgcaagaatcatcctgtattgtttcacttcagccgttctcaatgggattatctgaatcatacgttttctaagctgcttgccgaagtggttctggaaggtaacgatgaccttcaggccgttgtcaagcggtatgcctgtcttgtgatgcgcatcagcatgatccaggcacgcatccgccagttcgaggcgaatgatggcgcaccggatatctattgtgaggatgtagatttcgatcgttctctccagatcgttctctgctgttatgagcatagcaggctattattgtcttccatgccgtcttcccagctccatccgttgaaagatccgaacagtacacggaagttcatcggcgagttgccagaaacattcactaccgaagatgcaatgcagatcggcgtaaaatacgatttcagccaccgcaagatcagcaggctgataaaatcgttcattggcgtcaaaatcaataagatatctcatggaaagtatcagaagatctcataaaatagtcctatctgtcatttttgtccttttgtccttttgaagactctctgaaaacattgggaagtttgaaaaaaccttctcaatgatcggatgcaaacattgggaagattcaatacaatcttctcaatgttttttccttttatcagtgcgtctgtgtgcgtcactgcacatcacgggcacttgcccatgtagtatctttgttgtgtaatcggttacaggtaataagtattaagtattaagtattaaaaattatggcacagaattatgttgttatggctcgcaagaacctgttgaaacctagtgaagctcccaagtattatgcagtggcacgtagcggacggaaagtgaccgtcaaggaggtctgcaaacgtattaccgaacgttcgtcttattcaaaaggcgagttggaaggttgtatcggagagtttctgctcgaaatcgtcaatgtactggatgaagggaatatcgttcagatgggcgatctggggaatttccgcatgagtcttaagacggcaacggctaccgcaacggagaaggaattcaaggcatcgtgtatcgagaaaggtaaagtgcttttctatccgggaagtgatctccgcaagttgtgtaaaacactggactttgcactgtataagagtgacggtaagcccgattcgggagacgaaccgttgccggacgatggtaagggcgatcagcccggcggtggttcaggtgacgatggcgatgaagctccggacccgactgtttaatcaatcattatttactattaaagattaaaattgtatgaaaaagcaagtttggaagaatattcttcagttcattgtgacaattgcaacgtctatcatttctgctatcggggtaacgtcctgtacggctcatctgtaatacatccgcatggaaagttctaaagatgagtatctcccgagagagattaagttgttggtgattcattgcagcgctacgcgctgcaatggttccttccctgtagaacggcttcgagaatgtcatttgcaacggggttttcgtgatattggctatcatttttatatcacccgggacggagttcttcatcattgtcgtcccgtctccgaaatcggtgcccatgtgcgtggatttaacaggcatagtatcgggatttgttatgaaggcgggctggatgaaaatggcagaccggcggatacgagaactacggcacaacgctttgctctgctcgatctgttgacgattctcaagcatcagtatccggaggcgcagatagcgggacattatcagctgagtgctacgatccacaaggcatgtccttgctacgatccgagaaaagaatattcaggattataaaaaaactacgggagatggcgaaagtgctgcctcccgtagttttttgttgaatgaataaaaaagatttggggttacaaatctcccggcttacccaaatagtaggtgattaaccttacttcccgcacagaaaaagctttcgttttcggatgaaaatccgtagaaagtatctcatccattaatggttgacatctacgcatccagcgacgaagtttatttactgaagcgcgaacagttatatcagggaaatacatttgggctaagtcttgtttattgtagcatttcactacaaaatcaggttgattcattgtctctttatacttggtttataagcaataaagatacaaaattattcacccatttcctacgcttttttcatattttatttcaaatttactagtcttttctttcacttttagtctgaccatatccatagccgtaaccataacgtttaccatatccataatgcttgccatacttgccgtagccgtagtaataaccatattttcgcttcttcaggtctacgccgttaatgacagtacaaagattaggcagcttcttctcaaaagacagttcattgatcaatgtatattctgccttatgagtgtagtcagcacggcatacgtaaactgacaagtctgctatacggccgattaataaggtatccgtcaccatgccgataggagcagtatcaaggatgacataatcgaagttcttcttcaaagtttctatcgctctgtccagaccgttacgagccaacaattccgttggattaggaggaacagtaccacccggaagaataaacagattcttatttacatcagaaggctgaacaagttccatcaaatccgtttcaggattggaaagatactgagtaatacctctctccttattagagagctggaatactttattcaaccccggcttacgaatatcgagtccgacaatcaccactttctttcccaaaagagaaagactgattgccaggttcgacgatacgaatgattttccttcaccactgacagttgaggtcacaaggatcaccttctgatcattatcaagcataaactgaagattggtccggatattacggaaggtttcactcatcagattattcttgttctcgaagacggcgatagaaccattcttatcattcttctcatctgtcaatggaatatcaccgacaacaggaacactcgttagtttctccacatcggcacgaccttcgatcttgaatttagtcagttcaaccaagtagatgataccaaccggaattccaacaccaagtaccaatgcaatcaaatagatcataggacgtttgggggataccggaatatcgtcagctatcgcttcatcaataatcttcgcattattcgcagtagcagcaagtgcaatcgcattctcttcacgtttctgtaacaacatcagatacaatccggctttgatctcctgctgacgggcaatacttacataagcacgttcctgacccggagcgttgctgatacgacgggaatagcgactcgcctcacggtcaaggctctctttagtaatcatcaacccctgcaaggttccttcaagggtagcctgtacattggctttcatagcacggatactcgtatctagattcacaatcgtagggttattctctgttgatgtacgtaacaggcgtttacgctcaacaagcatctcgttataacgttcaatcgcaccgatcaaggcagcatcctgcaaacctacattacttggcaagacttcgtattcattgcctctcagatacttacgcaagtcattcaccagactgatttgagtacgattctccacactcttcttttcatactcagcattaccggccaaagcgatctgagcttcactcgtcaagtccgtgatacccgcatcacgcttgaaagtctctagattagcttccgtactacccaattcttttgagataatgccaatacgttcatcgataaactcagccgtcttctgagcgatttcgtttttatcattgttcgtattgcgattatacatctcaagcaactgattgatgaagtcctgcccacgttgcaaactggagttcttcaaggaaatcacagcgacagaagtcgttttagaggtaggggcaatagacaagctattacagtaacctcttgccacactcatcggcttgcttattgtcgcagttatatgacgtatgttcttctctatccgaggaactttcgttccatcctgcaaagtaactgaatcaacagcctgaaagaaggccagcgtgccttcatcagtcgggaagatagcaggcaacttctcaaaatgcttctgataacccttctcacccacagtcacattcacatccatactaccttcaggctgtaaggtcatctcgactaccatcgaagttttcagtttttcagcctcttgaggagttaggctcacctgtaccggagatgtcttatataaacctttagcaggaaattcatcctcatctttataagttatatacaatcccaactgattcacaacctcttttacaagtgttttcgaacgcagaacttccaactcgttatcaatgtttttagaagaagtcatcagaccgcttaatcccatatcctccagttccgatgaaagtcctgcacctccgcccttcttctcatcttttatcagaactgtggcggaaatattatagatcggggtagcccaatgcagataaaaccacgcaccaaccaaacatagcaacacagcacctacaaaccacggccagtgaataatatatttaaaaagcaacgcccggaaatcgatctgatcctcagccatttcacgttccttcacgttttgattttcttccttcataactctttctttttatttcaagatgttaaacaataaactggcaatagaaacaaggatcgaagtagcagagaaccacaaacttgtactagtaccgatatccgaatttcgagctttcgccttattcggagttacgtagatgatatcattctgctgcaaatagtaataaggagaaagaatagtttccgccttgttcagatccaaaggaataatttcctgcttaccattggcattctcccgtatcagctttacatcatcacgcagaccatatacagtcatatcacctgccatagccaaagcttccagaatattcaccttttcattagaaatcgtgaatgtaccaggacgggcaacttcaccaatcacggaaatcttataatttaccattcgtaccgttacaataggagtttccgtaatataaggtttcaacttttccacaatcatttgttcggtcgccttcttcgtcaatccgcctacatgaagctcacctaatacagggaaatttatattaccgtcattatccactagatattgttgtaggactggctgagtagtcgtataattcaaagcagcattactctgtgtagccactgtcaaattaaaaggcgcagccagttcaggactggtacacgacactacaatcgtcagcaagtctttgggcatgatctttgcatcatacagttgctcgttctgggtactatacagtaccacttcagcatcctgcaggtaaggtacttttttgtaggactgacaagctgtcaacaaaaatgctgccaatacgtaatatcctagttgtttcattctcttcatatatttctttctattgttttttattctatcttcattaaaactcaatcatttttatcaatcatctctcctatatgccccatcttttgcttcaaatatgacagaaggttctataacatttatcgtatgccatgctcctgcgggtatttgaataccaaatcgaccttctgctggagataatattttacgtgaaacttctttaaaacttttttgtcttaccacatcatcacaacaagaggttgattcatgaacgtattcactcacttcttcataaataatctcttctaatttaccaacaagacatattacagtctccgctgtcttttcatgtcgatgaataggtacttctgtttgcggttgtaaagcgttgagcatgcgttggctagtgtcggcaaatgatgtgcgcaaatcgaagttctggcgtaaacgtggattttctttagcccctgccagaagaatttcaagcaattttttatttatttccatactgtatattcaattatcgagcatttactttttttaagcacaaaaaagtagaagcaaaatacctataaacctttcagatatttcatatgcagaatattaataacgtcttaacaccacttgaaacgcctctgcataactacatccccattggctacctctcattgcagccaaacctaaaatatactcattgctacgaggatgaggatatggacgcatgacaccacgatacatagctaacgccttacatttggcatctacaccttctttacctacctcaacataacagttaggacggaacaaattcatggcatcattgatagcccattcactacatgaaggcacttccatataccaaaattctttcactggcttcacactaggctgacgctggaacaaacggatagcttcctgacaagccattgaagtctgcaaatgatcattgttggtatcagcaggatgatgagtgatgataatatcaggttcactctctctgattgcgctttctataaactgcaccagcttcaaatgaggcacagtattcatctcaatattcgggaacgttgcctcatacttcttgcgtacacccaaaaaatcagacgaagcgttcaaatcatcgttgaattccttatcttcaggtcggaatgtacgtgccttcgcttccgtacacataattgccacgtcaaccgtgttaccttcatgcgaccatttccacatgactgcgcctgccccgagaacttcgtcatccggatgggctactactaataaatatttcattgtattcgtctttatttacctcaaattcaaacattgcgtgattatccttcatttatccatcgttttctttgcatcctctaccagttcctttagcatccaagtacactccttaccgcacaccgcatagaaaatacaaatgactgtatatacaatcattttcaagtcatagaaaacacctgctttctgaacgtatgtatactccaattcacgacgaataggatacactttctccatatactccttctcatccgtaatttggtcaccataaatgaaatcataaagagcagctggaccactaagccctacttgaacttttgcagcttcattccatttcccataacggaacatatcaaattggtcttgtgccacaggacgtggaccgattaccgacattgtgccgttcaatatattcagcagctgtggcaactcgtctatctttaccttgcggataaaatgaccgaatggaaatatacggtcttcgtctggtcgcaaacttgcttcatttgcagccttagctactcgcatagaacgaaacttgtacattttaaaaggtttattatctttccctattctagtagctacgtagaacaaaggaccaaaatcggaaactaaaattccaagtacagccactatccaaataggagaagttatagtaatcccaactacagcacacataaaatcaaatgttcgcttaaagaatttgtagaacattaaattgcacttattaagtttttaattattggattatagaagacatatgaaatctttatatgtcagttttatgtgtttgcatcaataagcatgatgcttttactagttattttctatttgcctctgaggtatttccttcaatactttagccggccttcctgctgctatagtccacgctggaacatcttttgttactaaagatccagctcctacaattgcgccctcgccaattgtaacaccaggcatgacaaaactctccatgccaatcaagcacccttttttaagaacaatcggtttaattatatagcctaaatccatgtaatcatcatttacacaataattagagaagtctctttggtgacataataatcttactccagatgcaatagatacatgatcttccaatgttatcatatcagcgtgaccttgatcaattctgacataatctccaataaaacattctgccccaacatgacatcccatttgacgcattagaatgggacgaatctttcttggattaaaagattgaagaattgcccagtccatcatcttctccaagcgcttacgataaatatttttaaagaacctgtatgtcactttaatgaggcttacttgaccatattctttttccgagtaattaaatcctagggctctcaacaatttgtaggttgtacttaaattttcatttttcattgttactatttttagaattcgaattccatactattttaaaagcaaacttgcgcatacacttaggcgtcaagcgagttgcaattcgaattagagagttttttatgagatcccctaaagaatagaatcccatatcgtagaattcctttagatatctcacttcattttttagataactaaaaccagaacgtctatctaatagcgcttctgttgttctcacgaaataaagagattcctgaacattaaagaatttgctaccgttcattatcatgcgaacccaaagattataatcctcataatattgtttatgaagatagttccctgctgctaaaacagcactttttctcatgaaggctgccgcatgacaaattggagatcgcttatgtgctaattctacaatttcgttatgtttctcaggtcttgtcttaacagcaattacattatctttctcgtttaaaaatagcgtagaccaacaactaacgacatcatagccttcttcaatatgtttcagttgagtagcgaatcgatgtggtggtattatatcatcggtatccattcttgctaatatatcatatttggcagccaaaacacctttacgtaaagctaaccctaatcctaaattttgctcattctttacaatattgaaaatcggatattttttagaatattggtcaattatcgcatagagttctggagtaagtggaccatcttcaaccaatacaatttctgagggttgaattgtctgtttaaatatgcaatctagtgcttctctaaaccatacaggattctctttatggtatattgaaattagaaccgaaaaattagtcatttataataagtcttttaggttgttcttgatattgctcgttccccaataataatctacgattttcttttgttcttcattgatttcttcagaataagaactaaaagcttttccaacaataaatttatcttttaattgtgattgcattaagtcattatttatattctcggccttaatcacctcagctaaagactctttgtatgaaatctcttgcgaatataaataatgaggtttttcaagaaagatacaataacctatatgagtacctacttcgttagacatagtaatatcggataattcgattatacttttttgcctgcttaaaaaattgatatcattcttatgtcctgaacatactattttaaaacctagatcttcatatgctctgcaaagttcagccttttcacatatatctttccaatacatcgaaataataactgttttaaaatcattattcttttttattctcaaaatttcttttgtaaaatctgtattatcgaattgggtagtcattttatctatagaatgagaaggaaatactaataatgtttttcccaaagtttttttcaacgattttaattcattgctatctaataaaggcctcgcatatgcaatatacggtcctattaagcgaatttcctttttcgattcaataatattaatatctgaaccaagaatttgttttctataatttccaaaagaaatgattttatcaacaggatattgataagaatatttagcgacataatttccaaaaaacaaaccatgctctatatatgaatttaagaatagatatttagattctattcctataaactctttgattatgtaagacattccatatagattattctctggaaatttgtcgataaataacatcctcaaaggtttagaaatttccttatacgaaaaaatatttaaatcttttcgtaagtccattttagattttgtttttcgataattaattctttgaaaaaaagaataaatcagaagtaaaacagatgaacgtctaaatgcatgtttaattttctttactatatacatattttatatacattaaatgacctaaaaatacaataaacaacaaataagggaattgatacatcatttgacctattttttgtacatgaagaaaaaaatagattaatcctatggacattatcattgcacttttatttctgcttaagaagagctttactattcctaaaacaaacagaatatcaaaaaatagatttaataaaaaagatatgaaacctatatctgtagctttagcattatagctgtatatcaatattccagaacctaatatagatttagggttatataaataattcaatatattgttacttgtttcatatgacatattatcagcttgtagtttgttttgtattatttcaaatcctactttatctactatagcttgaaagtttagtattgaatataataaagttatagcaaaaaatatttttatataaataattgatttgttacttagattattgcagaaaaatacaaatgtcacaatgcataatgaaaagactatcatattggtaactgaagctgtcaataaaacattgataataaataggatcaaaagaagtaatttgttacggtactttggtaacataagaaataaacttggcattaatagcaatgcagatgcatgcggttcatgacaaatgccacagaagaagccaaattgtccaaagaatttaacgccacgatcggctaatatcatatatactgagtgcagtggattcgatactggtgatcctccaacttcataattcccattaaatagttcatattttgttgggtctataagaaactggttaacattaatagcaccaataagaagtagaataaatacaataatagaagcatatatagtatatagatttatccaacaatatggcaaaactactttgtctatagaattaaattctgcataagtaataattaatacacgccaaaatgatattattattagtaatattgaagctgcaagataaaaagtagaaaaaatttcatagtttattaatgaaatagctatttgaataattagtagtaagcaaaatactatataacaataataaaatggtgttgcttttgttgttgttcttctattataaacaactatatatatagtatttgataataaaattaaaacgctttgcattattcttgataaaggcaacaaaacatctaatataactgcaaacaagaagagtatgttcagggagcatactatactatagaagactatctgtttatttcgcatgagtaattttttttatgaggatagttgctcttttcaagagtaaactagcagataatagagccattaataacgataaataaaatgaatggcataatgactccataattaaaaaaataattaaagggcaaaaatatactggggctagaaagcttcggaaactatcctttgctgataagttcgtcatctttttgatgagaagtactaatacaatattataaaagaacatagcaattggtaatgcataagataccatcattatattatttgtactattaaagattgtatgactcgcaaacaataaaacgattattgttgatacacccagtataatcaactttaactctttcttttgttgaacaagaaatgtggtcataataaatgaatttgctactagtaattgagataataatagtatttgaaggatatattctgatttaacataatctggaacaattaattgaaggaaatgagaggctatgagtgctattataatgacaagacttgctgcaatcatgtaatattgctgcatttctcgcattaataataatgagttatttgtagaattagaagaacttagcttatttatcaaattcggataaataaaaaaactcacagaactatttaataacataacggcatcagatatgttatatgaaaatgaatattgtgcaaagtcttctatttgaaactcggagctaatataactttttgcaactaaaacaatgaaatagaagctaatgttatataaaagcaacataatccctcttcgtactagctttttagttgctttaatatcaatattattggaaatactaaattttgcatcaacaagaaatattataaatacaataccattggaaaataccattgcccacattatattatccaataatctttcaccatttccggtaaataagacaataaattcaccaatacatggtataatatatgcccaatttataatctttaatctatcatagactctataaatgtttatatatagttgattgatttgctttatgagaacgatgaaaaatatgtaaaacacatattgtcctatattgaatctattataaaattcgatctcatacaaattacatattgcaacaaaaattaaatagaaaaatgtaagggaaaaaaacgttatgataattgatgatgtcagtatgctggaattttttgttatatccttgtttgcatcttctgacataataaccaaacttgaataatttacgcccaagttggaatatgtaaagtattgaataatcaattttaaaaagccatatattccaaaatagaataggcctaatttattagcaataactaagctaataataaaatatattgcatacgttgcgtatttagatagaataaatacgactttaccattagaaattattttttttaacatcatcattagttacaaaatcatctgcttatattgttgctatatatatgttaggggattcgagcatatttatccctataaatgctttaataatctttttaattgttgataatccaacgctactaaagggaaaaagcagattgttatatttgctatattaggtaatggcgatattgcataaaccaacatttgaaaaaggaatatctcataagaacgtttacctatcagcaatattactttgtttacaatggtattagaataacgatggttaatctgaataaatgcaaaaggcaacagagaccaaggtaaaaaatatgtaaaccaatgaaatattgtccaatcagtattaaaaatcaaaggttggaacgaaaaatcagagtttgctaaatgcaaataatataacactattattgcaattatactgataattgaaagaatcatagttctgcttgtcattactattccatttctagccccaagatatccccaataataaataacggatgaacactaaacggtatatgtattcaggcattttaaatagggaacatattatctcagaagcaatgctcaaccctataaaaaacaaaagcacaacgtctgcgaactagatgctgaaataacggtaatgtaatcgccatttggatataaacccatatataataggaaccttgaccttttcctccactcgctaacaagttgagcatactaactataaagtctgattctttatatatggaatggacataatagtagataatgagtaacatctgaataataaagaaaggtaatattatacgtttccatagttttattacagtaggatatcttacaatttgatgtttatatgcatggaatgtctgtataagcagaaatataggaactgcctgatcaatccatatcggaaaaattaaccaattgcggatgcttctgagggttccatgacttatcacaaccataataatacctagacctttcaaaaaatctaatattggttcataccctctcttattcaatataatccttgattctctcatatcttacttaatagtcaaggattatattaaatcaaatttatggaagcatagcaaggtcttaatgataagtgtcgatgtatactgaatccattcttatttattccatctatatcatggtacttaccaacatatatacggtcgccattatgatccacatcttcgcaccataagaaatcatgataccatagcatttcgccgtaaacgaaaaagtatgcaaagaatgtatatacacattgaatggctgttggaaatttaatattttgcttaataatatcaataggcataacgcctcttgtattttcaaaaacattttttttcaaaagaaaccatttattatccattcttcgttgtataaaagactcagataagtaccaatcttggttatatagacaaggttctgatttatctggattcactccaaagcattttcgaaagtctagaatattaatagcatccacaccataaacaagaatatagtccttggagctatttatgagaacttcctcagtgaaattaacatcagggacttcgttttcgataattgattcaatccccattttgtttagtagtatatttgcctgcttgggacctaaataattatgtcccattattctttcagcatctgcttgagatgttatgctttccatatcttgaagattatttttttagtaataactccttccatttttgatattcaataacttcttcagcatttgccaaatgacctaaagcagtatatttatctatcctatcaaattctcctttaagtcgatcaaatctcactccccaaccgttatctagaaaccaattaagatttcttacaggtgcattataaagcacaatattacttttcgaatcgagtacctgccgaagaaatgtgagataagcacgatactggtgctcatgagatgcaacaagtgcaagtttcttccatcctctctctattgccatctttactatttctacagcctgttgttgcgtttgaagtgacttatcctcatgaatcaaatcttcatcaggaacacctgcttttaaaataaatggctttatttcttcaaagggatagctaccatactctttgtttacaatatttccactgaaaacaacttttttccccatgccttgatgatagaggtcagcagctttttggaatcgattaaagccatcaccctctaataggatgatggcatctgagggttgtagacaatcgttgtcaacgattgccataatcatttctctgtctgtaatcatttgttattaaatatcttcccaaaatattggatcacgtgcaggtatatcttttgttacagttttacctattacgatattcttgaacttgggggcaatccccaatgcaggtcggagaacatcaaggtcatcctctgctataatttgcccttttttaaggtctttctttgcatataggcatctacgctgcacaaaaacagtctctccttcttccttctgaacttctttacgtgtactccccattgcacgctccacttcacgaatagaatctaccataaatttgaattcgtcaggttccattgaatgcggatgatccggtcctttatcgtttttatttagagtaaaatgtttttctataacacgtcctcctaaaacaactgaggctaaggctacaacatgacctggagaatgatccgaatatccagtcaaacaatcaaatgcagattgatatgttttcaagacatttacattggcactatcaatctttgatgggtagtttgtaatacattgcattaggactagatccttattaccagttttctcaatgacgcgaatagcttcatcaatttcagacatagtagcatcacccgtagcaagcattataggaatatttttgcttgctatatattcaatcatctcaagccaggtgatctctccagaacctattttgataaaaggtactttcattttagcacatagatcaactgcttccttattataaggagatgtggaaaaatcaatccctacctttttacaataatcagcaattttctggtgccattctataggaaattcgacatccttaaatacttcagtaacagtacgtccccatgacccatgtacaccatgtaatgtcatttttgaaaagccgccttcagatacaatactttcagccttgaatgtttggaattttgcacaatctgcaccagcttcctttgccgcatcaattaacttcttagccttttcaatagaaccatcaaaatttgctccaatttccgctataaaataagtaggatgatccatcccaatcatccgactccctattcttatgtttttattaaaatttgccataatataatgtttaattgagacgtttaaacccagattgacaaataggaccgtcaagagatttcgtaatatccttaccatcctcaaaatcacgaatctgagcaaataccttatctaattcaaagaaataatcatctaagatttcttgcgtatgggctatacaagggtacatactattaccggcaagataccctttctttaacatttcttgagttataaatgtcttataagcaagatgatttttacttttaaagttgtaaccagcaagagccgggataccccattgttcaatttccaagtcatacttatcagccaaagcctgccaacgttgtttattactatttccaatagctgtaatgacttcccaagatttaacacgttccatgactttcaacgtagctaacgcagccgtagggccaatacgttctgtccaaaatgtgctgctgatccaggtcctttgtgctgcattcataacatctttacgaccaacaacagcgcaaatagcatacccattcccaatggttttactatatattgccatatccggttctacaccatattttttgtataagccaccgaatgtttcacggaacccacttgtacactcatcaaaaataagaattataccacgttcagttgccaaatcacggactttctgcagaaaatcatcctcaggaccaaagtttcgacagacttccatgttaattgctgctaactcattatgatttacgacattaagcaattcctcaaaattattataccgaaaaggaatagtagagccacgtaatccccttggaacacccgctggtggaataccaggaagcagatgaccagctaacgcatcgctatcacccaaattaacagaaacataccaatcatgccaaccatgatagccgcaaatagcaaccttatctttccctgttgccgctctagctatgcgtacacatacagaatttgcttcaccaccgccacgagtataacgtaccccaccggcccacggatcaagttctataagtttttctgccagatagacttcttctggacaattaaatgtagttaagtttccgtcacaaataaccctcataaccgcctcgtcaacttcctcatttgcataccctaaggtatttgtaccaatgcccatcattgagcaatcaatatattcttttccatcaagatcccatacttgacatcctttagaacggctatagtatgccggccaattttccggcaaaaattgttccggtctttttgaaagcaacatcgttccaccaggaattatttgtttggcttttttgtataaatcttgtccttttcccataataattaatcgtttaataatgactttgcatatccttcgtctctcatatgactattattcaaatctctgactctttgattagaatccagatatttaatataatctatccaatcagcttctttaccaacattttccaatagttccttcaccaccataaagtcttcttgagtatccacagtaatacgatattcagagctttcaatcggtgactcaacattaactgatgtaaatagagttcctccattaaaagaagaattctttttaatatatggtgtcacatgttctcgttcgcttttgagcaaggcctcattgtaagctctttccaaagctgaaaaacgaaaaacttctgtatcaataccatcaggataagtcggctttaaagtatttgaagcataatcacaaccagcagaaatacaagtagtaatcacgtgatctataacatgtggatcaatcaaaggacaatcagatgttactctcacaacataatcagggctcatatcctttactgcaaaatagaagcgtccaagaacatcatttattgaacctctataacattctataccattccgccgtgcaacgcgtacaatttcatcagatccatcctcgatagtagttgcaaccaccaacgttgtgatttttgtagcctttagaactctttgtagatgtatatccaaaagtgtctcatcacctactttcttcaagactttagcaggtaatctggttgaactatacctagcctgggtaactgcaactattttcatttcactacaaaatttggatctacatatttctttatattttcacgcattgtttctaccgtttcccattctgtattattatcagaactataatgaaatccttcagacacgagtaccgcattatgatgttgtataaactcttctcgcgtgtgcttataagatacagaaggaagaatcacataatatttacccaaatcaatagtatcaaaagcatcagtgacagtaatcatctcttcatgcaacttttctcccggacgaatacctatttctatttgagaaagattaggcgcaatagcagtagctacatctttaatacgataagaaggtattttcggaataaaaatctcaccacccaaatgatgacctattgcatacataaccaatgccactccagcttccaatgagatattgaaacgggtcatacgcatatccgtaataggcaattcttttgcaccactatcacgtttatttataaaaaaaggtattactgatccacgagatcccattacattaccataacgaaccacagaaaatctgatatctttggaaccactgatattattagctgctgtaaatagtttatctgacgtcaatttcgttgcaccatataaattaataggcgcacacgctttatccgtcgaaagtgcaaccacatgcttcacacctgtcgccaatgctgctttaataacattttgtgcaccatgtacattagtttttatacattcctcaggattgtattcagcagtatcaacctgcttaatagcagcagcatgaattatcacatccaccccttcacaggcacgtatcaaacgctctaaatcacggacatcaccaataaaatacctcatttgaggatacttctgctccgaatacttctgctttaattcaaattgtttcagttcatctctagagtagataatgattttctttacttgcggataatcacgaaggatggtctccacaaactttttaccgaaagaacctgttcctccagtgattaaaacgactttaccgtttagcataataatcttattttaatgatttatcgttaatactcaatttatcctttccataagacaactttttaaagatacctcacagaaaattattattaaattcgattaattcctaactattgatacactgtcaaggctatattttgtgacactagactttaaaggaccttataattgctaaaattcacaataaaaataaccaaaacactcataggcgaatgaccttgcggttccacagcactgattatactatagtcggtaggtccctcatcactagcaaggaattcttaattataaaaactttcgacatttaatattctttcaagaagtcatcctattgaaagaaataatctgtactacatttcctcatagcgtcccgcaaagtaaatatttttactttcaaccaattcaattaaatcattctcattgctaggtagacttcctgattatttcatccaatcgctctacatatttcttttataattcggtagtgagatccctaataagatattcttgaaaaaacggcaaacaaatcaactgataggtcacccactgtcaatccatcctctataaacacacttttcattatatccttacattctctcaattctccaaatttatcacctattttttacacaaaagaattccgaagcatgaaaaaaatattataaaaaagcattatatataaaaacagtctgaattattccgcctccacatacttcattctttttaattactatccaagacttcaaacctcggtgagttcttggatttaaattcaggtaccactctcttcattagtttcactgtgtccatgatctttaccgtacgggatagtttctcgaactctccataagtttcaaggatatcagtatactcataatgacgtaccttcgctatcattatcttcttattctcggtaggaattgtattctccttatcactcaagacttcttcataaagcttctcacccggacgcaatcccgtaaactctatctcaatatcctcacccggacgataaccggcaagttcgatcatacgggtagccagatcgacaatcttcacagcctttcccatctcaaagacaaatatctcattgccttcacccatcgtagcagcttccattaccaggcgacaagcttcggggatagtcataaagaaacggatgatatcggggtgagtcactgtgacaggaccaccattctcaatctgttctttaaaacggggaatgacagatccgttactacccaatacattgccaaagcgggtagtgataaatttggtatggcctttcacttttccctcacggatggcacagcccaagctctgtacatagatttcggctaatcgtttcgagcatcccatgacattggtaggatttacagccttatcggtagagaccatgatcatcttctcagctccatattcaactgccatatcggcaacctggcgagaaccgacaacgttgaccagcacagcttcacagggattctcttccattaacggaacatgcttataggcagcggcatgaaagatgatctgaggctgataagtttcgaataccatacgaagacgttctttcacacggacatctccaatgacaggaacaaaatcaagaccgggataattcttctcaaattccaggcggacattatgcagaggagattcagcggaatcaaacatgatcagcttcttgatgttcatctgagccagctgccgacaaagctcactgccaatgctaccggcagctcctgtcaccagcacaaccttgccacaaaactcagtcatcacttcctccatattgatatgaatttctgagcgacccagtaagtcttcaattttgatagggcgtacccattggtggaaactgccgttttcgtcagcctcactgatactcggagcaatcaatgttttcaacccgcttcttttgcaatactgaagcaggcggtcttcctcttcacgggtattctcgtaacgggcaaacaggatgccgccgatacacttcttatgaataagtttattaaagcactcttcatccttaaataaataaacgggaagatcagccacgcgtcggatggagtcgcccgttccatagatgcagaagcctaccactttatagtgggagctgttcattaaccggactttcaatgccacactcttatcatcaataccatagatcagaatatgcatattcttcttattcagcatattcagcaggagttcataaaccagaatcaactgaatacggaagcctaccatggcaataaaagtcagcataccatcaaacagtacaaagactattttctgactattatgcagtcccgtctgaggcaggaaaagccagatagccattgcgatacagacagcctttatcagtgcacttccggcaattctccataattccttcaactgggaaaaacggatcgtattacggtaggtatgaaataaaaaggaacctaagacactggagatcacagaaatcgccaaaatatggaagagagaagtgatttctttagaagtctccgttatataatgaatgccgataaatgacacccaggtacaaatcaaagctatgaacgtatcaattcctaatacaatccaataactaaaatagtttttctgcaaatattgaacaaaacggtcaaatgcgtgtttcataatttaaataccccaataaattataaagtctttttctaaaaagtagatttactatgacaatagtttatcgtagattgtgtgtaactgaattttcaatggtgaaggcaattggtttttcagaatcatttgcgaacgcctcagaacagtttctttctttgcctcatcctccgaattggcatacatagacacactatatcccatcagaagagacagacacaaagcagcttcctgctcagcagtcttaccgtgacaaggatacagatcattgatctgttcatggatctctttattaagtagtgaaagatcgtcgacacatatacagtccatattctcacccatatgaagcaatgtatcaactgttttttgaagtttttctattttcccctgtatgctactattgaaggtccccatcacctacttagtttctttcgccaatttgctctacatatccgataggcatatcgacacaggcacagcccaacatatccaaacggacagcaatcttacttttgccatctaacgcaactagttctccaaccagtcccgtcaaaggacctttgataacacgaactttctttccacgagctaatggagaataattcatacagattgcctcttccgaataatcaagcataaaacggaaacgcgccatctgatcatcaggaatcacagcaggctttccctcaccacgcaacaccatgtaacggcttaccgtggcaagagttaaagcagccatccgttccttcggatcggcatgaacaaacaccatcatcggaagaagaactgtttcaactaatttacggcgatcactccattgatggatttcttgctggacaggaacaaaagtctcaattcccattttccccaaatattcggctacttttttttcgtgatgtatgcgaacatgtgccacataccagcgttttaagcacgctacgccctcccctgtcccatttttggtcccgaggatggctgatttctcttttgttagaatcatgtttttttaccccatatgtttccgttacttcttaggtaacggaagtgtataaagcataaacgaacaatgaaaaaaggttgaaaagcagcagcaaatatgttgtcaagagagttacaccctaagtagaagggtatataccaatggaaattaggtatataaggagtggggcatgaaaataagtatttttcatgtctaaagatgtttttaccctatattttagataaaactaaaaaaagtgggctttaatttgtttcttatttgtgtttttgtctatctttgcatcaaatttacttccgttacctaagaagtaacagaaacagatccatgctgactatcaacttattaaatattttacacccgtcctatccgacagttcttcacgtaagataaattcattcgattcacttctgtacgttcctgcagaccaaaacctttcagataaatctgagtagtcttaatagacttatgccccagcgactcactgatcatctcaataggaacaccacgatacttggcggtagtagcccaggaatgacggatagtataggaagtgacgggagaagtcagccgaagagccttggcaagtctcttcagacgattattgaacctgcggagagcggactgatattcccggtatgcactttcatcttctctcttcttgtcgccaagaaggatactgaacagatagtcgggacaatccggatgagaaggctgacagttgcgaagccgactgattatatcctgtgcagtatccagtacttccacactcatcggagttttcgtcttgatacgattataccggatgatattccgttccagcgaagatttctccagatgagcaaggtcagcgaaagacattccgcagaattgaaacatcaaggcagcgatagcctgtgtacgacgcaaacgttccgatttgggatcttcatagaggaggcgattaagttctccgacaggcaacgctttcttctggcaaatatccactcccgtataaacatcatgaaacagacgatgcacatacggagctctgcccgactccactcctctattatagatgctacgaagcatacgcatatacgttgataccgtattcggcttcagaccggaactataaagatactgcccgtaacagcgcaagcgttcacgggtgacttgccggaaagcaacatgggtagtgccacaaaacttggtaaaagaaaaaagagcattcgtataaacatgggccgtagaatgacgcccctcttttcgtaaacgaccgatgtacgactccgcacaacggctaaatccatttttattcatatatatcactagtaaatttatacaatgataagacgaaaaaaatgatttagcaacagaagtttaaaacctttccaaaaaaattatataaaactgaatggggatagaattgatgctactccactatccacttctcaatattgcgtgtttctgagctaaaattgacacctatcttgaaaagtcggcgtccgtctgcctcaaaaggaagtgcataatgcttttcattaatctgtttgatagcttcttcagcagtaccatccaacttaaattccatcacatatatgaatttgtcagtctgtaagacaagatcgatacgcctttctttctacaacgcaaagcaggcgagatagtttttctcgcctgcccggtctatacttttatcaataatattgtctattatttacacgtatgtttccagcaattttacgtttccagcttccggagtaattgttacatcctgtgttgtagcaggaagcagaatagattctccggcacctactttcagttcattaccttcattgtcttttatcttgcatgcaccttccatacaaatgaagatcacgaatgaatcgagttctgaataatcacagctgatttcttcggtcatatcatacacggaagtagtgaagtacggacaagctacaagttctaccggctcatctttcaccgcttcatatttggtacgataatcatccaacacttcgtaattgatggcttcacgcgccaggtcagtatgcaattcacgagtctttccgtttgcatccttacggttgaagtcatagatacgataagtaatatccgaagtctgctggatttcggcaataaacgcaccggcgccaatactgtgcacacgtccggcaggaaggaaaaatacatctcccggcttgatctcatactcctgcaatacgtcagtgatcgtattgttcagcacgcgctctttatattctttcggggtgatttgctcggaaaatccagaacgcagtttcgctcctttatcagcatccactacataccacatttcggttttacccattgagttgtgccttttctttgccaaatcatctgccggatgcacctgaatggataaatcctgctttgcatcgatgaatttgataagcagtgggaatttattgccaaaacgagcataattcgcttcgccaaccagttcctcgcgatactttctcaccatatcagccagagttaaacctttgtccgggccattagccacaacagattcattgtcctctacgccggaaatctcccagctttctcctactcctttcaagtctgaattcaaatgcttgaacggaataattttgtcgcccccccaaagcgtctgcttcagaataggttcgaattttaatggatacatttttgtttttcttgttaataaacttagattaaattctcccggattataataatccgggaacaaacatacgaaaaattgttcactttaaaagaaaagaaggatgaaaaatacagaaacctaagtgagaacgctaaactttcctaaactacccaccatatttagccggaataatttgtgagtaacaaagaatttacctttatttgcaagaaaattttaagaataccagacatgaataacacattcccaacggaagggaatctatcagggctcagccggaaagatttccaaaaggagataaataataaagaaacagatttatttatcctcaaaaataaaaagggaatggaagtcgccgtaactaattacggatgcgccattctcgctatcatggtaccggataaagatggaaaatatgcaaacgttgtcctcggacacgacagcatagaccacgttgtcaacagcccggaacccttcctcagcactactatcggacgctatggcaaccgcatcgccaaaggaaaattcacattgtacggagaagagcacgagctcaccatcaacaacggtcccaactccctgcacggaggacctaccggttttcacgcccgcgtttgggatgccgaccaactggctgaaaatataatccagttcaattatgtttcagccgacggcgaagaaggtttccccggcaatctggaggttgaaatggtttatcgcctggaagaagaagaaaatgcactggtaatcgaatatcgtgccacaactgacaaaaccactgtagtcaacctgaccaatcacggtttcttcaatctggctggtatcagcaatcctactcctactatcgaaaacaatattgttactatcaacgctaatttctacacgcctatcgatgaagtttctatcccaaccggagaagttgccaaagtagaaggtactccaatggacttcaccactccgcataccgtaggcgaacgtatcaacgataaattccaacaactgattaacggtgccggatacgaccactgctacgtactgaacaagattgaaacaggttcactggatttggctgccacttgtttcgaaccgaatagcggtcgtaccatggaagtatacacaactgaagcaggtgtacaactttacaccggtaactggctgaatggtttcgaaggtgctcacggtgctacattccctgcaagaagcgctatctgcttcgaggcacaatgtttccccgacactccgaacaaacctcatttcccctcggctactttattgccgggcgatgaataccagcaggtgactatctacaaattcggtgtggaaaaataaaagaaaaaaaaataactaacctaattttataaactaacatttttaatagaaccatgacacaagaaaaaaagaatggaaaaatcattgccattatcacgatgattttccttttcggtatgatttcattcgttactaacctcgcagctcctatgggtattgtgctgaagaaccaattcgacgtatccaatgctttgggtatgctgggaaacttcggtaactttatagcttatgcagtaatgggtatccccagcggtatcttgttgcaacgtgtgggatataagaaaacagcacttatcgcagtagctatcggttttatcggcgtaggtatccagttcctgtccggtcattcaagccctgagatggcttttgccgtttatttgattggtgcattcgtagcaggtttctctatgtgtttgcttaacactgtagtaaacccgatgttgaacaaactgggtggtgaaggtaacaaaggtaaccagcttatccaggtgggcggctctttcaactctgtaatggctaccatcactccgatgttcgttggtatcctgatcgccggatctatcgaaaaagctactatctctcagattttccctgtaatgtacaccgcaatggctgtattcgctttcgcattcttcgtactcctgtttgtacgcattccggaaccgaacgctgctgctacaactgaaccaatcagcacactgatgaaaggtgctttgaagttccgtcactttgtattgggcgctatcgctatctttgtatatgtaggtattgaagtaggtgtaccgggtactctgaacctgttccttactgaccctgtagaaaaaggcggtgccggtatcgcttctacaatctccggtttcgtagtaggaacttactggttcctgatgttgatcggtcgtctggccggtgcttcactcggtgcaaaagtttccagtaaagcgatgcttacatttacatccgctctgggattgattttagtattccttgctatcttctcttctacaggaacattggtgaatctgcctgtacttcaacaaagcgcaactggcggtttgtcattcggttttgcagaagtgcccattaacgctatgtacttggtattagttggtctctgtacttctatcatgtggggtggtatcttcaaccttgctgtagaaggactgggtaaatatctggctgctgcttccggtctgtttatggtactggtatgcggtggaggtatcctgcctgtaattcaaggatgggtagctgacgtagccggtttcatggctagctattgggtaattatcgctgctctggcttacttgctgtactacggtctggtaggttgcaagaacgtaaataaagacattccagtagaataaaaaatctgaatttaatttattcaccttataaaattgatttatcatggatatagaacacgtaagaagtcgcttcattaagcattttgatggaactacaggatttatatatgcctctccgggtcgtatcaacctgattggcgaacatactgactacaacggtggattcgtattccccggagctgtagacaaaggtatgcttgctgaaatcaaaccgaacggcactgacaaagtaagagcttattctatcgacctgaaagattatgtagaatttggtctgaacgaagaggatgctccccgcgcaagctgggcgagatacattttcggtgtatgccgtgaaatgatcaaacgtggcgtagacgtgaaaggattcaataccgctttctccggtgatgtgcctctgggtgcaggtatgtcttcttctgctgctctggaaagtacatatgctttcgcattgaatgaactgttcggtgaaggtaaaatcgacaaatttgaattggctaaagtaggtcaggctactgaacacaactactgcggtgtaaactgcggtatcatggaccagttcgcttctgtattcggtaaagctggcagcttgatccgtctggactgccgttcactggaatatcaatatttcccattccatccggaaggctatcgtctggtattgatggattcagtagtgaaacatgaactggcttcttctgcttacaacaagcgtcgtcagagctgtgaggctgctgttgctgctatccagaaaaaacatccgcatgtagaattcctgcgtgactgtacaatggatatgctggaagaagcgaaagctgatatcagcgctgaagattatatgcgtgccgaatatgtaatcgaagaaatccaacgcgtacttgatgtttgcgatgcgctggaaaaagacgattacgaaacagtaggtcagaagatgtacgaaactcaccacggcatgagcaaattgtacgaagtgagctgcgaagaacttgacttcctaaacgattgcgctaaagaatatggtgtaaccggttcacgcgtaatgggtggcggcttcggtggttgtactatcaaccttgtcaagaacgaactgtatgacaacttcgttgaaaagacaaaagaagctttcaaagctaaattcggcagaagcccgaaagtatatgatgtagtaatcggtgacggttcacgcagagtagaataagttattattcatcagaattaaataagcagggcgtctttccggaatggaaggacgcccttacttttcaattaacaaaaatctaaaaacctattatctaacctaaccctataattatctgtttattgtacgccttccgttgtcatctgaatgcgtttcatggtaccgtcttcgttataatacaaacggtcgatgcagacggaacggcggaaactgcctccggctgtattgatgcttccattatgataaatgaaataccagtcgcccttgaactcgataatagcctgatgattggtattggaattgccggctatctcattaaggatgcctttgtattcccaaggtccggtaatgctacggctcatggcgtagcatatcttttccggaaattcagaagcatatgaaaggtaataccagtctccacgcttatgtatccacggagcttccgtatatcggggcagatgaaccggtacgataggaccatccagctcgatcatattctttttcagtttgacatagtagcattgagtattcccccaataaagatatgcctgtccgtcgtcgtcaataaaaacagtcggatcgatatcttcccaagagatcttggtaaattcggtcgtcatatcattggtgatcagtgcggaaccacgggcatccacaaaaggaccgacaggcgaatcagatacggctacgccgatggattttccgtgaatagtgccgtgttctactgtcacataccaatagaactttccgtcacgttctatcacctgactagcccatgcttccccttttgcccaactaaaatctttggctttcaaaggtacaggatgctccgtccatgtcttcatatcgggagacgagaatacacaccattcattcaactggtaatgttctctgggaggaggacattcatcatgtccggcataaatgtacaccttaccgtcatgcaccatagcacccggatcggctgtatatttatattttatgatgggattgccattggctacaaaagtagtgtcattctgcgcagacagcccggaaaaggctgccaatacgcatgaaatcataactagtttaacgctattcattttatttcttcgtgaatttataaactgcaaacgtgttcggtccgagttcggtggttaacgcatgaccattgatcgttaccggtgtctcctgcggagtgatggcaaacggttgttcaagcgtattatctttgtcctgatcgagtgagctaagagtgatgcaacgtccttcggacaatacatcctgctttttcagaccttcgaaagtcaaggatacaggctgtgtcttatcggaagtattagctactttgacaatcagttcgttcttatccttatcatagactgcactggcaaaaagtccattttgtccttccgcccctgttaccggtttcttgttcatagtgagaggaagtacattcgttcctttgttctgtgcgtacagctgctgcacataataacttacggtacgcaccgagttaagattatcaaaccaaatcatgtccggacgccattgccatccctccacatgagcgaaaagcggcgcataagtagccatatgtacgatatcggcattgcgttccaatccggtcatgaaggctgcttcgagcaaggcagcatggaagtggttccatttctttccttttccgtgacaagcatattcgccggcaaatactttcggtcctttgcggtcatagttatcatagcgtgctccctgactaaggaaccagctttcgggacggtagaagtgttcgtctaccagatcagctttcagacgtttcatctcaggccacaggtaatcgaattcttttccttcggagttcgggccggaactgcctacaatcatgatttccggatacgccttgcgaagagccttgataaacggttcgagacgttcgggatactcttttccccactgttcattaccgatgcctagatatttcaaattgaaaggtgccggatgtcccatatcggcacgtactttcccccaagtcgtgttcacatctccattggcaaattcgatcagatcgagtgcatcctgaatatagctgtccaggtcgcaaactgctacgtgagctttttcttcattgttctgatactgacaggcaagtccgcagttcaggatcggaagcggtgccgctcccatttcttcagaaagaaggaaatattcatagaatcccagtccgtagctttgataataatccggatagaaacgatgggtaaaggtatattgccagcgattttcgttcaatggacggttttctaccggccccacggatttcttccagtcataacgggtttcgagatccgtaccttcaacgatgcaaccaccggggaaacggaagactcccggatgaatatccgccaaagcctgcgcaaggtctttgcgaagaccgttctcatgtcccttccaagtatcgacagggaaaagggaaatatgctccaagtctaccgtaccctgggaagcaaggaaaatacgaagcgttgctttgggattggtaacacccgcttttaagattacctgatacttcttccagtctttggaatcaatggtcagtgtctgagaggcaaaagcctgatgttcgcccatagatttggtatctacaagttccacacgtatcttttcacctgtacctccgtgcggcagacgtgcccacacagagaagcggtattcttcaccttgcttaaccccgatgccgaagaagccttcattatccagtccggtatgcttgtgggcatgtcccgaattatcaagacgcacataatgcggattgcgttcaaaaggaccgtcatcctgcaaagtcacctttccataagtcttccatcccatcagacgctgagggaattcgaatgaacggttctttaccagttcggcataaagtccgccatcggcagcataattgatgtcttcaaaaaagagtccgtacattgtcggctggatttcagcacccaacttcttagtctggatcaccatttcattggtttgcgcatgaagcgccatgccggtagataaggctaatgcagccagtaattctgtgtatcttctcatggttttcaataaaaattatatatagttatttgattctttttccccagacagaacgtccccggctatcgagtccggtaaagagaattgtttcggtttcgttctcccaatcgtgtcctgcaaagataaccagattctcaatcttctccgagttcaaatctaccattaatagatgtttttcggtcaaaaaggaccattttccattcatttgaactatattccattcgttatcggtcatctgccctttgcacgtgccgtcttttaccaaagtcattcgggtggacaagttccattccttctctttcagttctccctctccccataagatctgtccggcttccagctgacgttcgtatgccggttcctgcactcgtatgatttcccattcaccgaccagatcttctttgctgaattgacgcgaagcagtccctgcatatctctcgggagaagcgaccggccagccttcgggagtgaagaacaactgccgtatatgtaacaccattaactgattttgcggtgacagacgtccctgatgtgccataaaatagtttccttcaccgtcagaaaagacggcacaatgcgctgtacccgcccatccggtatggttctcaaaacgatatggtgcagtcagtatcgggaagttgttggtcgtatctttcacagccttgccaaagtagtccgtaaacggaccttcggcagcatccgaacggctgacacgtacattataagtcgtcatcagcggatcataggaagtgaaaagataatattgtttcagctccggatgatagattatttccggtgcttcgagattgtccttccgatagttggcacgccgtgctacaaggtgccccaaatcgccttcgtttaaggctaatccggtttcaggattcagttcgacgcaatacagaccaccgaagaaggagccgtaatgcatccaccatttaccggtattttcatctgctatgacgctcggatcgatagcattcatggcagtagaatcatctgttttaacgatacagcctttctgtgtccatggcccttcgggagaagttgattcggcaagtcctatataggatgttttacgtccgaatgcggatacgcaatagtagaggcggtatttatctttataagggatgatatacggtgcccagatattggtcgccccctgccctcctgcatgaaactgtacccattgaaccgattcttccggtatttcaggaaatgcccatcccagaaattcccaatgtaccaaatccttagaacggcgcatctggataaatcccaacggcacgcctttctctctcgcttctttccggttctcaccgaaaatcgcatctgtagaatacatataataatagtcgcccagcttccggcaggacggatcgtgtacattgtatgttccccattgacggtaatcttccattttggctactgataaataattatcatcccaaggattagcagaaggagtcggagtaaacacggaagaagtgcaacttacaaagaagctgcctgctactaaaagaactggcaaaaacaagtttttcataatatctgtgtattcgttcatcaattatgctacaaaaatacgccccgtttcccctatgaaaggtggacatacgaacacgattggtggacaatccgataatctgctgaaaagaagctcttcccatttttgtgattgaagagattcttctaactttgcccttattaatacgtacatatatgaaaaaacacctacttatataccttataatatatagtatctgttcactggccggacaggttcgggcacaggaacggtttgccgaccgctataatattacgtatgtgaccatgaacgaggggcttccacataattttatcgacgatttgtacaaagacagccgggggtttatgtggatttcgactgccggaggcgggctttcccgttatgatggctatgagtttgtaaactacactcccaataatcaccaatgcaaactaaaaagcaactttatacgcaatgtctgtgaagacgccttccaacgcctttggatcgtctccgaagggggaacggatattattgacttatctactttaaaaccgattatcccccatgacccgaaagggatatttccaaagatactggaactaccggctacccgtatcatgaaagatacgcaaggctgtatctggcttcattgcgacaacgcccttcaccgtatcgaattcaatgacaaaggggaagtgcaaatcctgtctacactcagccctgtctatctgaatggtccggacattgctctgaaagacattgacgaggatgggaaaatatggatgggaaacaatggagaaatacgaaaagtggcattaagtccgcaaaagagactggtaaccactcccatagccgactgcctgaagttcgaagcgggaacttatatttcggatttcctcagcaaagagaatgaagtctggatctccagtgaccgcggactattccgctataataaaactggaaatgtgataaaacgatatgagcatgattccggcaatccctattccctgtcgcaaaattatctgacaaatttagctatcaccgatgacaaacaattaatcgtcgcgacactacgtggtattaatatctataacccgatgacggataattttgaacgtatagcctgtgaccttccaaatggcggtaccaatctgctgaacagtaactttattaattgcatattgactgatggagaacatatctggttcggtacggaaaccggaggtatcaatctgttgaatccacggcaactatcgatacggagctaccggcatgacaaggaaaatccgtcaagtttatcctataatcctgtcaatgcaatttatgaagatgtatacggaaccttatgggtagggacagtagaaggcggactgaacagaaaagaacggaacagcgaagatttcacccattatacacgtgaacacggagggctgagtcacaactccgtcagtgccctgactgccgataccgacaatcacttatggataggtacatggggaggaggtctcaatctgcttgatctgaaagctccccgacagatactggaggtaatttcctcacagaccggcggaggctttccgattaactttatcggagtattgaattatgaccctattaatgaaggtatatggataggcgccaatcaaggactctatttttatgatccggtaaaaaaggaaataactgctccgttaccggataaggctgctgaaaatattcatggctgtatcggttccattattgataaggagggtaaactttgggtcggttgtctggaaggggtttatatcatcgatctgcattcccgttcctctaaaggagaattccagtacaggcacctgaactacaaactggacgatccgtcctcccgcctgattgagaaaataacctgcttttatcaaggtaaggacggtactttatggctgggcagtaacggatatggcatttatcaacgaaaaatcgatgctcaaggaaaagaacagtttatctcttatagcacagcgcaaggactaccgaacaatagtattcggggaatactggaagataacaacggtaacttatggatcagtaccaataatggactctcctgttatcatcaggcagagaatcgtttcattaactataccatacaggatggtctgattgacacacagttttattggaacgcctcatgcggttcttctcatgacttactctatttcggcagtgtaggcggattggttgcaatcgaaagtaatcgtccggcgatgtctcttccggctgccaaagtacgtttcacccgtctgcggataggtaatgaagaaatattgccgggcagcgaatacctgtcggaagatattgccataacgacagaactgaaactgcatgaaaaagagaaatctttctcactcgaatttgcagcgcttaactttgagtcaaacaatacagccatatacagttatcggctggtcggttttgacgataaatgggtacaggttccgggcaaccgacgttttgccagttatacgaatttgcctcccggttcatatactctacaagtcagatacactcctgacggcgaaaacgagggagaaaacataacggaactgaatattacgattgtaccttatttctataagaccgtatggtttattctattcatcatcgtattgttgtctgtcagtgtatggcaattctatcaatggcgcatccgtaatctgaaacgacagaaagaatatctgcaccgcacggtagaagaacgtacccatgaactggaacagcaaaagcatctgttagaaaatcaaacggatgaactgtcacgccaaaaccagatgctgattcagcagaatgagaaaatcacgaggcagaaggcacaactgattcgtatgtcccgtaaagtgcaggaattgacgcttgacaagatttcattctttacgaatattactcacgaattccgcacaccgattaccctcattatcggtcctatcgaacgtgcattgaaattaagctataatccgcaagtcattgagcaattgaactttgtggaacgcaattccaaatatctattgtctctcgtcaatcagttgatggatttccggaaggtagagtccggcaaactggagattgtgaagactcggggaaattttctgaaatttatcgattcactgatcactccgtttgaagtattcgcccaagagcggaacattgtgctcaaacgctattaccggatggagatgccggagattttgtacgatgaggaagcaatgcgtaaggtggtcaccaatctgttgagtaacgctatcaagtttactcctaacgggggaactgtgtctctctacctatctgctctttccgccaaggacggtgaaaaggagacattgtatatttgcgtcaaggacagtggttcgggcatccctgaagaagacctcaaccggattttcaaccgcttctaccagtcgcagaatcaagtgaaatacccagtatacggacaagcaggcacaggcatcgggttatacctctgcaagcgaattgtacaaatgcacggcggagagatcaaagcattcaataaccgtcatgcaggatgctctttccgcatcctcctccccttgcagcgggaagaagggacagacgaaaagacaatcattattgatcacaacgattcgtccgcaatccctgttcaggattccggcgctccaaaagagaaagaggctttaagtatgctggttgtggaggataatgctgatatgcggggatatatccggtctattcttcgtgaacagtatcatgtactggaagctgccaatggcgaagaagcattacatatacttaatagtaatccaatagactttattatcagtgatttgatgatgcccgtcatggacggaatcgagctgtcccgaagggtaaaggagacatttgccatttcgcatattcctttcctgatgctgactgccaaaacctcacaagaagcccgactggaaagctatcgtatgggagtggatgaatatctgctgaaaccttttgatgagacattattattgacccgtattcaaaatattctggagaaccggaaacgatatcaacgtaaatttacgcttgatatggacgtggacgtacttaatatggaagaagaatccggtgataagaagttcctcaatcaagtaatggaggttatcaaagagaactacaagaactcctattttgaagtcagcgatttttgtgaagccgtcggggtaagcaaaagcctgctgaacaaaaaactgcaaaacttaatcggtcagtccgccggacagttcatccggaattacagactgaacatcgctcgggaattgattctgaagaatcgggaaacgaagaatatgaatatagcggaagttgcctacgaagtaggattcaatgatcccaaatattttacaagatgcttcacgaaacatttcaatgtgacaccaagcgcactgctgaataacgaagaataactgatataagggttgctattatgaaacaatgatagcagcccttcgtcttaaaatgaactcattttaagagacatccgtccaatattatactcaaagtgtaaaaaagacacttatataaccgtttatccacctcgaaaattcatttgtccacctttaatatactcatcggttgtatttttgcgacactacaacgagtagaattattgttgaaccattaatatcaatatctatgaagacaaggaaatggccgttactacttatggcaattcttaccgttctcagtatgagttcttgtcaggattggggagaagccgacccaccggcaagaaatcaaaaacttccggcaaagccggatacctccgctaaattaatagctgaatttacatttgacgaagatttcaactctactgccaccgaaggcgaaacacctgtatcgggggaaggttttgcatacagtgcagatcaggagattccggaaatcgtacaagatgatgcaagagaaagtggagttatgcacgccaacggcggatacctccgcattcccaaccctcttatcggtgcagatatccagacaggagtctcatttagtttcttcgtaaaatctactaaaacagaccatacaggcgcactgatctcattcagtgacggaacggacaaactgtatttcactgcaaatgcttttttgagctataccggcacaggaggctatctggacgtaaatgatccggaagtcagtgtaacgaacgcaatgccttacgggacatggcattatgttgccttgactttcacagagaaaggatacgccatttatatcgatggcaccaagaaatacgataccaacaaccatgccagcatcagttccggaaagacaagggctgtgagcgtaggtgacttcgattattccaatatgatcgatttattgtcatctgcgacctatatatatttaggctatggttcggatacggaaacagccgaagcctattatgatgatctgaagatctggacaaataccttctcggacagcgatgctcagggaccgaatatcggtggcggaatacacgtgcccgatcctgtttataaagctactttcgaaacgactactggactacagattgtcggcggcggcagctttgttacggatgataatagcgccttcggaactgtattcaagaatatccccggaggaatgcgtcagaattacttgttgcttccggaagatgtaatgtcacattctgccgaaacgaaagaaatgtctatcggtatgtgggtgaatgcgaaggatgccggaatctcatccacttatatgtggtcaccattattcagtgctcacgggcaggcaccgggcatagcaggtactgccaatacggataactggcctatgtttgcattgtatgtaagaggaacattacaactgaataatgccggatggtgcaactttgatgatgcacagaatgtaaatggtaccaatgctctatatcatgacgccactgactggttagccgatcacgggtggcattactatacagtaactctcaccgctacttccgccaaagtatatatggatggcgaactgaagaacgaatggcaggtggcaggtaccggagataataatacaattgaaggtgcattcatttatggtgccaactacaaatacatcactttaggcggaaatcaggcgttcgactggggcgatcccgatccgggattcatgtttgacgacttcgcagtctataacaaagaattatctccggaacagatcaaacaaattatggaagacaagacattggctctaccaactcctgtctacatcaatacctttgaagaaggagccggagatgcaaaaatcgtaggttcgggcaaaatagtttcagtggaagacaaagggttcggacaaatattccagaatgtagccggttctaaaggcactaattatctgatgttgcctcaggatgctctttctcactccgtagaatctcaagaagtgagtatcagtgtatgggtgaatgccaagaatgcaggagcatcggacgattatcgctattctcccctattcacggcatacggaaatgagccgtcggcaggatcagagatggccattgtttgtcctgcaatcacgcggtctcgcccagataaactgtaacggatggacagacttcaccgccgcacagaacgagaaaggtgtcaacaccgtttattgctcggaatatgcagcagatggaatcgtttgtgaggaagactggctgaaggatcatgaatggcatctttacacagccgttctcacgtctaccacctgtaaaatctacattgacggagaagtcgccaactcatggacagtctcgggcagcggtgacggcaataccatctccggaatattcaccaacggtgcagatttgaaatacatctcattgggcggaaaccaggcatggacatgggctgaccctgatcccggatttatgttcgacgacatcgctatctacaacaaagcactgacaatcgatgagatacaggctattatgaaaaagaaaaagaattaaaccttaaagtttagtatacatgaagaattttatactgatactctgcctcgccacattcagccaatgggtgtatgcgcagaacaagcagatctccggacgggtagttgataccaaaggcgaagccgccattggtgcaagcatacttgaaaaaggaactacaaacggaaccattaccgactttgacggtaacttcaaactgacggtcggaccgaaagccatgttacaaatcagttatatcggctataagacacaggaaattcctgtagccaacaagacgaaactgaatatcaccatggaggaagacacggaagtgctggatgaagtcgtagtggtcggttacggtgcgcagaagaaagagagtgtggtaggtgccatctcacaggtttcttccaaagaattgttgaaatctccggcagccaacatttcacaggcgattgccggtaagatttcgggtgtaatcacttctcagacttccggtgcaccgggggctgacgatatgaagatttatatccgtggccgtgcttctttcgcaggagacaaccaaccattgattctggtagacggcgtagaacgtgagttctcacagattgccccggatgatatcgaatcgatctctacgttgaaagatgcttccgctactgccgtatatggtgtacgtggtgcaaacggtgtgatgctgattacaacgaagcgtggtaaggaacagaaaccgactgtcagcctgaccgccaactggcaaatacagtcccctacccgccaggatacttatctggattcttacaattcggttgtattgctggaagaagcgctggctaacgacggactgccttctcaatattcagcatccgacatcgaaatgtataaaagagcctcagcaggacaactcagcggaatcgatgccctcctctacccgaatgtagactggtatgacaccgttttgcgaaacagtgcaccggcacaacgctacaacgtcaatatacagggcggtaccaaacgtatgcgttactttacttctgccgaatattataaccaacagggattgttcaaggaattcagtcaggacgaatacggaaacaagtcaaactccagcttcaagcgtttcgctttccgtgccaatctcgacttcctgatgaccaaagacctgactctttccgtcaacttcgggacacgtttcgaagaacgcagaggaccaaactcgaatgaatcgagagacggaacttacagtcaggcattttatgaaatgaatcatacaccgggatggttgtttccggtatcttatactgtaggtgaaggtgaagaccagaagacattgtacagcggcagctcacaataccagaataatatcgtggcacgttttgccaaagccggtttctaccgctccaccaatacgatcaatgaaacaaatttcattgtggattataagatggactggctcaccaaagggctggcagcaaaaggtatggtatctttcgactacgacgcttactatatgcgtgctttcaatgccgactttgccacttatgaactgaatgaccgtaataactacaattcaatagacgcttatacccagttcaatacggatacggaacttgcttatctgggcaataaccagactaccacttataaactttacatggaattccagctgaactgggcacgaaaattcggcaaacatgacattaccgctatggcactgtacaaccaaaatgactaccgttatcaggcagaccttgccgaacgttaccaaggactggtaggacgtgccacatacggctacgatgaccgttacctggcagaagtcaacttcggctataacggttcggaaaacttcatgcgaggcagacgcttcggtttcttcccttctttctccgtaggatggagaatcagcaacgaagctttcatgaaaggaacggaggagtggctgaacaatctgaaaatccgtgcatcctatggtgaagtaggtaacgatgtatacaaagtgaatggcgtaaaacaacgtttcctgtatcaggcagtgtggacacagataaccaacgactatcacttcggaacaaccggatataccggtatctatgaaagccagtaccctaactatgcagtgacttgggaacgtgctcacaaatacaacctgggactggaatttggtttatggaacggactgctgaacggtaatatcgacgtattctacgaaaagagaaacgatatcctgactccttatctcacccgtccgcaatgggttggcgtcaatatggctgccggcaatctgggagaaaccaacaacaagggtttcgaaatcgaactgaaacatgcgaaccatatcggaaaggactttacctataatgcaagtctgactttctcacacgcccgcaatgaaatccggaacatggacgaacccgccacaaagacagcttatcgcaaacaggaaggtcatccgatcaaccaatacttcggtctggtgtgcgatggttttgtaacccaagccgacttgaacaatcccgattttccggtttctactttcggcaatgtacaggtaggcgacctgaaataccgtgatatgaacggagacggatttatcgatagccgtgatgaaacatttatcggctatagcgatgttcccgaaaacacttacgccttgtctctgggatgcgaatacaaaggcatcggattcagcatcatgtttcagggagtagatcatgtttccagatattatgatgcggaagcaatgtacgctttcgtgaatggcggtaaggtaaaagaacatcatctgaaccgctggaatcccaaccagtcggaagcatacaaccttacccatgccagttatccgctgctccattatgacagctacggcgaccataaccagcgtaaaaactcgttcttcctgaaaaacggtaacttccttcgtctgaagaatatcgaactaagctactcgcttccggcccgatggatcagaaaagtagccatgaacgaatgccgcgtctatgtaaatgcaaacaatctcatcacgtgggataaactggatggtctttgcgatccggaaagtgaaggttccaaccgttacccgattatgaagacagtgaactttggtgtaaacattaaattctaacagatataagacatgaaaaagacaatcatatataccgccttttggttggcaaccgccggaatcgccctgacttcctgtgaagatatattcggtggttttctggacaaacagcccagcaacgaactgacagaagaagaggtattcagccaatggactactacccgtgagttccatttcgatacttacaacttcctgcgccacggtgcctgccgcatcaacaactcatggatggatgcagctaccgacttagccgaaaccagctacgccagcggcggcacgcgtacaagtttcaacatcggcaactattatgccagcggtgccgccactgaactcaccggcacatgggaacactattaccggggtatccgcaaatgcaatatgctgttaaagaacatcgacgacgtgcccaaagctacggatgactcggaagaagcacacgctacctatgtgaaacaatacaaggcggaagctcatttcctccgtgcttatttctactgggaaatgtttctccgctacggtcccgtccctctggttacagatgtactcgatccggacggagacttgctcagcaactataccacccgcccttccttgaaagaatatgtagttgacttcattctgaaagaactgaaagattgcgaagaaggattgatggataaagctacttctgccgaatcgggcaaccccggacgtatcagccagccaatggcacgtgcactgtattcacgtgtcatgctctacatggcaagcgaccgtttcagaagtgaatcgggtatcagctggcagcaagccgccgatgcagcgcaaagcttcatgacggattacggaacactctacggactctacacgactgataccgatccgaagacatgctataccaacgccatcctgaagaacgcacatgacgagaaaaataatgaaacgatcttctggcgtaatgatgtagctgtaggatggggagcgatctataacgatacgccggtaggcgaaggcggcaacggaggtttgtgcccgtcacagaatttagtggatatgtacgatatggcgaacggacagtctcctttcagcaattatgatgaaaccggcgcccctgtttataatggaacagccactccagccatcaacaatgccagcggatacaagagcaatgatccttacagcaaccgtgacccgcgtctggcggctaccgtactctacaacggtgtgaattggggtaatggtataattaatgtactcaaaggacaacgggataacccgcaaggaaatgcaaatgcaacgccgaccggatactatacccgcaagtatattccggaagtgatcctgaacaataaccataccggcagcaactaccgtaactggattatcatccgctatgcggaaatcttattgaactatgcagaagccttgaatgaagccggcgggtcacgtgccgacgtactgaatgccatccagcctctccgcgaccgtgtagggatgactgccaaactcacagaccgcagcgatcttcagaccattgccgaccgccgtaacttcatccgcaaggaacgtaccgtcgaactcgcttttgaagatcatcgcgcatgggacgtacgtcgctggaatgtagcggaaaaagcattggcacgtcctatctacggaatggaggttaccaaggaaaacggaaagtttgtctatacacgtaaagttgcccagaaccgggtatttacggagaaaatgtatctctacccgataccggaaggagaagtatggaaaacgaatatcgaaaacaacccgggttggaacaattaactgaatgaatatgcaaccgatgaaattaaataacatacagacaggattcaaaagaatcctactcaccgtagccacagctttcatgctgggcaacggatgggcgcaagatgctaaagtcctgaaaggacgaatcgtaaatgcagagggtgaacctatcgcaggtgcggtggtcaacgtagcggaagcaagccgcatcgcactctcggacaaggacggtttcttcactttgaagaatgtaaaacctgccgacgagctttatgtaagcagcgtaggctatctgccggcaacagccattgccgactttgatgagaacttcaagattgttatggatgccgacctggatgaatatgctcatacgactccgcttcctttcaaccgcaaacccaagaagtttgtgacagagtccacttccatcgtcaccggagaagaactggaaaaacatccggtaaccgttttgcagaatgcgtttacctccactgtcaccggtgtagagacgtatgaggcgcaatccgaaccgggatggagtgaaacggctatgtatatccgtggcatccgtaccatgaatgccagcgcacgcagtccgctgatcatcgttgacaatgtggaacgtgacctctcattcctcgatgcctaccctattgaatcgattacgatattgaaggatgccgccgccaccgctatctatggaatgcgtggagccaacggcgcagtactcgtaacgaccaaacgcggagaaaccggtaagactaaaatcaacttcacacaagaagtcggcttccagactattgccggaattcccgaaagccagaattcttataactatgcgctgagccgtaatcaggcacgatacctggacggattaagtcccgaatattccgatgaagacctggaatactaccgtcgtgtctgcaacggtgagcagttggaaggaatggccaaatacaaatacttcaatacgaactggcacgacaccatgctgcgggatgcagctccgcaataccgtaccaacctgtctgtcagcggtggtaatgcacgtgcacgctactatgtctccttctcttatctccgccaggaaggtttgttcgacaccaaatggacggaatggaacgaaggatacagcacacaggaagtattgaaccgttacaacctgcgttcgaacatcgacatcgatgtaaacaagtttctgaatgtatcgatggacttgggcggacgtatcgacaatatctcccaaccgggcattgacgtatggaacctctttacctggggagccggcgaaaatcttccggtgtatcccgtattctgcccgaacggtgaattctttatgccgaccagcagcgacagtaaaaacggtgccgcacaaatcgccggacgtggtgtggagcagaaccgccgccgtaacctctatacaaccgtaacggctaccggaaacctggatgccctcgttcccggactgaaagccaagatgacgttcagtttcgactcttacgaaacattccagaaggtgcagcaagccgatgtcaatgtctactactataactatatggctgatgtcaacgacccgtcggaatatacataccaacgcatgagaacgtacaaagcattgcccaatgccaccacttctccacgtgactattactataatctcaatatgaacggcggactggcatacgaacatacattcggcaaacatgccgtcaatgcccaggcttttatccgtacttatcagaatgtagtacgcggacaggaatcatccaaccgctacctctcttacaatgcacaggctacctatgtatataacaaccggtatatcctttccggtaatatctcccgcatgggcagtgataattatgccgacggcgaacgcttcggaacattccccggcggttccgtgggatgggtactttctgaagaatcatggctgaagaactcgttcgtgaatctcctgaaactccgcgcatcctatggacgggcaggacaagccgtaacaggcgtcagccgctacccgtaccaaggtacattcaccgaaggaggcggatataatttcggtacttcccaatcttacacggaaggtgtatatgaatcgacagccggcaacaagaatatcaaatgggaaatctcagatatggcaaacttcggcgttgacttcgacttgtggaacaagaaaatctacggttctgtggacttcttcaaggaatggcgttccaatattctggtatcccgttccaccgtgcccggcttattcggtgtaaacgctccgcaagactcttacggcaaggccgaaacgaaaggttttgagatcactttaggacatagcaaccggatcggtgattttgaatactatatcgacggtatgctgaccttcaacaccaacaagatcaccgaaatggatgaactgactcccgattacgcttatcaggcaagaaccggcaaccggatcgaccaaagccagctcctgatctggaaacaatgggccagtaatcccgacctgattccggagtcgtatgaagatgccgttgccaatcctcagaaatatccgtggaacgctgccggtaaatacaagctcggcaatgccgtattccaggatacgaacggcgaccgtaaaatagacagctacgacaaagtaccgaccggatacacaaatattccggaattaatcccgaccatccgtttaggtttcagttggaaaggtttcgacgcacgtgccgtgctgacggcttatctgaaccgcaccgttccctgtcgcgagaatatggactatggtttcggctggggaggtacttccactcatgaaatcaccaacacatggggatattataccgatgatccgacagacccgcgcaatatcaacgccaaatatccgcgtttgtctacttccttcagtgacctcgaccggaactatccttacaatgagtctaccatctgggtagtcaatggagatttcctttcattgcgcaatgtggaagtcggctactcgcttcctgcacgattgatttctaaagtcaatatgacgaaatgccgtctttacttcagcggctacaacctgtgcaactggagccatctgcctaaaggctttgatccggaaaacccgaccaactatatctgggcatatcccaagacacgttcatttacgttcggtgtgaatatcggattctaatcattcaataaaacagcaaagaattatgaaaagaatatcaacttatatagttactctggtcctcgcactcgcaggcagttcgtgcagcgactacctcgacaaagagtacgatgcctccttatctgaaaagaaagtgttcaataaccagaacctgacacgcgagttcctcgccaacatctacacgaatctgccggacggactggcgccactgtcggacgaccagttcacaggtgcttcacgtgactgtatgacggataatgcagtgacctgctggggacttcattattatacaaagatcggcagcgacggatacaccgccggcgaccatcccctgctgggcttctggaacaccgacttatacgggattcggaaatgtaatatgtttctgaagaacgccaaggcatccgtagtaggaaatacggagaaagacggcgatgacaaccgcctttacgaccgttactgtgcagaagccagactgcttcgcgctatcttccatttcgacttaatctgctggttcggcgctgcccctgtcattgcggaagatgaatccggcgaaccgatcatcttcgacttgtccgatccttcggcaatgaacatgttccgtactcccgctgccgaagcacttgaatgggtagccgaccaatgcgaccagatcaaaaaccagctccctttccgctacagcgatgaagcatccaactggggacgtgtcaacggagccgccgcttatgctttaaaggcaagagccctgctctaccgtgcttccaaactgaacaatccggacggcaacaccgcatactgggcgaatgcggcgcaggcagcagccgacttcatcactcagaataacaagcaaagttacccttaccgactgtacaatacgggaaatccagagaatgactattacgaatgtttcacgaccaatccggtatacaacaatgaaattatccttgcacgctctgtatggaataccaatcaggtagaaaaagtattcctgccggtaggctttaccggttctttctccggaaacggacgtaccaacccgacacagaatctggtggacgcttacgaaatgagcaacggcaaacggatcgatgagaacggcagtacctacgatgccgccaatccgtataaagaccgtgacccgcgtctggcacaaaccatcttctatcaaggcatgatgtggggacgtgccgacaaagaagaaagacgtgccatcgacgtacgctacaactcggatgcggacaaaggagtggattacacctcagccatgggaggcacctacaccggatactatctgaaaaagttcgtgaataacatttcctgcaaagaaccggccacctatcctcacgcatggatgattttccgttatggcgaaattctgctgaatgccgccgaagcctataatgaagcggaaggtcctgccaaggcatacagttacatcaatgaggtacgcgcccgtgccggtatgccggcctacgcagatatgtcgcaaagtgaactccgcgaacgtatccgcaacgagagacgcatcgaactggctttcgaagatcatcgtttcttcgatgtacgccgctggaaactatatgacaatgtaacctctacgggagaaaccggaaagccccgttacaaccagttgctgaatctttatggagtgaaggtcaccggcaacgcagatactccctcctataccttcggactggcagaaacggtcaattcacgcacgtttgtcaatcccaagagttactatttcccgatacctgccaacgaagtgaaacgggcacccaatctgggacagaatccgggatgggacaccggaagcgcttctaacgaataaacatcaaaacaatctaaaaaagaaagactgagatatgaaatacttaaagaccatctatcttctactctgttgcacgctcgctctggcagcgtgcagcgacgacgatgaaaactccgcatcaggagctttaagcatcacaacgccggcatatacgaatgtggggtataacaaagcaaccttatccgccaatatcagcggaacggaaggagtgaatatcgtcaaacggggattctgctacgccacggcatcccatccggacatttatgacacgacctccgaagtcagaggatcggaaatcagtacgaccctgaccggcctgactccacagacgacgtattacgtaagagcctttgtcaccctttacaacgaagagcccagatactcggaggaaacttctttcacgactcccgccgagacactgagcgatgaactggcagcgtacgaagcacccacgtatgtagacgactacacaagtttctcagcctggagcaaccgttatgactggaaccttgccaacgtacacgaccctacggtaatgaaaaccgatgacggatattactatatgtatcagacagacgcttcttacggcaacgcgcacagcggaaacggacacttccacgcacggcgttccaaagacctcgtaaactgggagtacctgggagcaactatgagtgaaacgcccccgacatggatcaaagaaaagctgaatgcctaccgtcaggagatgggactggaaccgattgacaatccgtcttacggatactgggcacctgttgcacgaaaagtatcgaacggaaaataccgtatgtattattccatcgtaatcacgaactacatccaaaccggaaaaccggaaattgagaacaacggcaactttgacggttcatggaccgaacgcgcgtttatcggactgatggaaacttccgatccggcaagtaatatatgggaagacaaaggattcgttgtctgctctgccagcgataagggaaagacggattatgggcgcagcagcatcaatgactgggaagggtattttaaaatcaatgcgatcgaccctacttatataataacggaaaatggcgaacactggctgatctatggttcatggcacagcggtatcgctgccctacaggtaaatccggaagacggcaaaccgctgaatgctttgggaaatccctgggacatcacaggggaagacaattcgggttatggaaagataatcgccacacgtggcaccagccgctggcaggcatccgaaggtcccgaagtgatctatcgtgacggttattactatctgttcctggcttacggttcactgtcggtagaatataatacacgtgtctgccgttctaaaaacatcgacggcccttatgtagacatacacggaaattccgctatgggaagcgcgcaactatatccgatactgactgctccttaccggttcgacaacagctacggctgggtaggaatttcccattgcggcatcttcgatgacggagccggcaactggttctatacttcacaaggacgtttccctgtgaacgtaggcggcaatgaatactccaacgccatcatgatgggacatgtacgcagcatccgctgggatgccaacggctggcctctcgttatgcccgaacgttacggagccgttccgcaagcgcctatcacggaaaatgaaatagccggagactgggaacatctggcattgaccaccagtacgggcacccaacgaacgtccgaaacgatgacttatgatctcggtacgcataagataacttccggcagctggaaaaatgctacatggacatttgatgcagcgactcaaaccatcacgacaagcgccggagtagtactctatctgcaacgtgaagtcgactgggaagccagtccgcggacacatacgattgtgtatgcggcccagggtaatcaaaagacatattgggggaagaaactccaataaccctctatagaaaaataaatatgtgttttgctgtcaccgtcacaaagcagagcataactcgcttataatgaagaagtaaagcagtgacagcaactagtgacagcactgtgatggcaatttttgctgtcacagtgctgctatatctaccggactttgccgacggtcatgcgtaggtccattcgtttccatatgccggaaccaacagttccaagcggatgaaactctagtttcaagcagaggaaactttagtttcaaactgaagaaactttagtttcaagctggtgaaactctggttccaagccccagaaactatccagctctatatagaaagagaaaatgcaatataacgatcccgctccaaagacaggaacatgcgatagttttatacgtaacagtaaagttcttatccttttatgttgcacaacatataagagtgtatttgatacaccaaacaaaagtgttacttttacacccaaaataagataagcatctcatttacattaaaaataaaaccatgaaaaaacattttctacttgcaggaattgccgcgctgatgcttgccgcgtgcaataacaagccggcttccgagctgactttatccggtcttgacccggcaaaatttcaaacagaagtgaacaatgcccaaacagctctttataccttaaagaataaggcgggtatggaagtatgcatcactaacttcggcggacgcatcgtgtccatcatggtgcccgacaagaacggcaagatgcaggatgtagttttaggttttgacagcattgctgattatattaatgtacccagtgatttcggtgcttctatcggccgttacgccaaccgcatcaaccaagggcgttttgtactggacggagataccatccaactgccgcaaaacaacttcggccactgcctgcacggaggcccgaaaggatggcaataccaagtatacgaagccaaccttatcgatccgacaacactggaactgactcttatctctccggacggtgacgcgaatttccccggaaatgtgactgctaaagtaacctatcaactgacagatgacaacgccatcgacatcaagtacagcgctactaccgacaaaaagacaatcatcaacatgaccaaccactcttacttcaatctggctggtgatccgtcaaaaacatcgacagacaacatcatgtatgtaaatgcagattactatactccggtagacagcaccttcatgacaaccggcgaaatcgctccggtcaaagatactccgatggacttcactactccgaaagcggtaggcaaagatatcaacaactacgacttcgtccaactcaagaacggcaacggatatgatcacaactgggtgctcaacaccaaaggtgacatctcgcaggtagctgccagactgacgtctcccgaaaccggaatcacattggaagtatataccaacgaaccgggtattcaggtatacacaggtaacttcctcgacggaaccgtaagcggaaagaaaggcatcgtttacaaccaacgtgcttctgtctgcctcgaaacacaacactaccccgacagccccaacaaagccgactggccgtccgttgtgctggaaccgggacaaacgtacaacagcgaatgtatctttaaattctcgacagagaaataatattaacttataaatcaaatttattgtggaagcattagattggctagtaattggagtcttctttttggctctgataggtattattgtttgggtagtcagacaaaaacaaaatgactcggcagattatttcttaggcggacgtgacgcaacatggcttgcgatcggtgcctctatcttcgcatcaaacatcggttcggaacacttgatcggactggcgggagcaggagcttcaagcggtatggcgatggctcactgggaaattcagggatggatgatcctgattctgggatgggtattcgtacctttctattcacgaagcatggtatacacgatgccggaatttctggaacgccgttacaatcctcagtcacgtaccatcttatcggtcatttctctggtaagttatgtattgaccaaggtagcagtgacagtatatgccggcggactggtattccagcaagtattcggcatcaaggaactctggggaatcgacttcttctggattgccgctatcggactggtagttctcactgccctatatacaatcttcggtggtatgaaatcggtactttatacttctgtacttcagactccgattcttctgttaggttcgttgattatccttgtgctcggtttcaaagaactgggaggctgggacgaaatgatgagagtgtgcggtgctgtgacggtaaacgattatggtgacaccatgaccaatctgatccgcagcaacgatgatgcgaacttcccttggctgggtgcacttatcggttctgccattatcggtttctggtactggtgtactgaccagttcatcgtacaacgtgtactttccggaaagaatgaaaaagaggctcgtcgtggtactatcttcggcgcttacctgaagctgttgcctgtattcctgttcctgattccgggtatgattgctttcgcattacatcagaaatatatcggtgccggtggcgaaggtttcctcccgatgcttgccaatggtactgccaacgctgatgccgccttccctactctggtagctaaattgcttcctgccggtgtgaaaggtctggtagtatgcggtatcctcgctgccttgatgagttcgctggcttcactgttcaactcatctgccatgttgtttacaatcgatttctacaaacgcttccgtccggagactccggaaaagaaactggtgggtattggtcagatagcaactgtagtgatcgtaatcctcggtattctctggattcctatcatgcgtagcgtaggtgatgtactttatacttatttgcaggacgttcagtctgtattggctccgggtattgccgctgccttcctgctgggtatctgctggaaacgtacttccgcacaaggtggtatgtggggattgatcgccggtatgatcatcggtctgactcgtctgggtgccaaagtatattacagcaacgcaggtgaagtggcagattctaccttcaaatatttgttctacgatatgaactggctgttcttctgcggatggatgttcctgttctgtatcatcgtagtcatcgtagtcagccttgccacggaagctccgacagctgaaaagattcagggactggtattcggtacggcaacaaaagaacaaaaagcagctacccgcgcaagctgggatcactgggatatcattcatacagtaatcatccttgctatcacaggtgccttctactggtatttctggtaattaaataaattcattcaaaacgatgaaaaactattatagttcgaatcctaccttctatctcggtatcgactgcatcatcttcggttttaatgaaggcgaaataagcctgctgctgctgaagagaaacttcgaaccggcaatgggcgaatggtcactgatgggaggattcgtgcaaaaagacgaaagcgtggacgacgctgccaaacgtgtactggctgaacttacaggtttggaaaacgtatacatggaacaggtgggagccttcggcgccatcgaccgcgatccgggcgaaagggtagtttcgattgcctactatgcgctgatcaacatcaatgagtatgaccgcgaactggttcagaagcacaatgcttactgggtaaacatcaacgaactccccgcactgattttcgaccatccggagatggtggacaaagcacgggagatgatgaaacagaaagcatctgtcgagcctatcggattcaatctgttgccgaagctgttcacactgtcccaactgcaaagtctctacgaagctatttacggcgaaccgatggacaaacggaatttccgcaagcgtgtcgcagaaatggactttatcgaaaagacggataaaatcgataaactgggttccaaacggggtgcagccttgtataaattcaacggcaaagcctaccgcaaggacccgaaatttaaattataatcaatatgctggaagaactgaaagaaaaagtatttcatgccaatctcgaattggtaaagcatggattagtcatctttacatggggaaatgtttctgccatcgaccgtgaaacgggactggtagtcatcaaacctagtggagtcagttatgatgatatgaaagcggaagatatggtagtagtggacctggatggcaaagtcgtcgaaggacggctgaagccatcctcagatactcctactcacgtggtactctacaaagcattccccgaaatcggcggagtggtgcatacccactctacttatgctaccgcatgggcgcaggccggttgtgatattcccaatatcgggacaactcacgctgactatttccatgatgcaatcccctgcacagcggatatgacggaagctgaagtaaaaggtgcctatgaactggaaaccggaaacgtgatcgtaaaacgtttcgaaggcctgaaccctgtacatacaccgggagtattggtcaagaatcatggtcctttctcttggggaaaagacgcacacgatgccgtacacaatgcagtagtgatggaacaagttgccaaaatggcaagcattgcttatgccgtgaatcccaatttaacaatgaacccgctgctggtagagaaacacttcagccgcaagcatggtccgaacgcttactacggacaataaaataattgacaattgacagttgacaattgacaattaatgcgagaggacatgaaggataatgtagtaaaagataaaagtttggagttcgctgttcggattgtgaatttatataagtttttagtaaatgaacaaaaggagtttgtgatgagtaagcaaatattgcgatccgggaccagtattggtgccaatattcgtgaggctgagcaagcacaaagtcgggctgattttattaataagctgaatatagcacttaaggaagcgaacgaaacagagtattggctggaattattgattagaacagagtatatcactcgggaacaatatgagagcatcaataatgacagcacagaaataaacaaattattaatatctataattaaaacaacaaaaaacaattaataataacccgcaattgccatttgactttcgacattctctcattgtcaattgtcaattgtcaattgtcaattcaataaattatgaataacgtatttgatcagtatgaagtatggttcgtaacaggagcacagctcttgtacggaggtgatgcagtaatcgcagtagacgcacactctaacgaaatggttaacggtctgaatgaatcgggcaaacttcctgttaaagtagtatacaaaggaacggccaactcttctaaagaggtggaagctgtattcaaagcagccaacaacgatgacaaatgtgtaggcgtcatcacttggatgcatactttctctcctgctaaaatgtggattcatggtctgcaacaattaaagaaaccattgctgcacctgcatactcaattcaacaaggaaattccttgggatacaatggatatggactttatgaatctgaaccagtcagctcacggcgaccgcgagttcggacatatctgtacccgtatgcgcatccgtcgcaaagtagtggtaggctactggaaagaagaagaaacattgcataagattgctgtctggatgcgtgtttgcgcaggttgggctgactctcaggatatgctgatcatccgtttcggcgatcagatgaataatgtagccgtaaccgatggtgacaaggtagaagcagaacaacgcatgggctatcatgtagattattgcccggcaagcgagctgatggaatatcacaaagatatcaaaaatgctgatgtagatgctttggtagctacttacttcaatgattacgatcacgacgcttctctggaagacaaatcaaccgaagcttatcagaaagtatggaatgctgccaaagccgagcttgctctccgtgctatcctcaaagcgaaaggcgccaaaggattcactaccaactttgacgatctgggtcagactgacggtagctatttcgatcagattccgggactggcttctcaacgcctgatggcagaaggctacggattcggtgctgaaggtgactggaaatcggctgctctttatcgtactgtatgggtaatgaatcaaggacttccgaaaggctgttcattcctcgaagactatacactgaactttgatggtgccaacagttctatcctacagtcacatatgttggagatctgtccgcttatcgcagctaacaagcctcgtctggaagtacacttcctcggcataggtatccgtaagagccagactgcccgtcttgtgttcacttcaaagacaggaacaggctgcaccgcaactgtagtggatatgggtaaccgtttccgtctgatcgtaaacgatgtagaatgtatcgaaccgaaaccacttccgaaattgccggttgcttccgcactctggattccgatgcctaacctcgaagtaggcgcaggcgcatggattctggccggtggaactcaccactcttgcttctcatacgacttgacagcagaatactgggaagattatgcagaaatcgcaggcatcgaaatggtacatatcaataaagatacgactatcagctgcttcaagaaagaactgcgcatgaatgaagtatattatatgctgaacaaagcgctttgctaaaaaccaatcactgagtccacttaaaaaaatcggtaccatctccattggtaccgactttttagtcacacacaatatggatactggcgacttttaattcaacccgaattaaagacacttccgccttttgaaagcagactcagtttttgttctccacacttattgttataccttaaaatatcggtttccaacatgaaattagatgcaaaatcaaccatcgagacaggtaaagctatccttggcatagaactcggttctacacgaataaaagctgttctgattgaccaggaaaacaaacctatcgctcaaggcagccacacatgggaaaatcaactggtcaacggactttggacttacagcattgatgccatctggtccggactgcaagattgctacgccgacctccgctccaacgtgaagaaattatacgacacagagctcgaaacactggcagccatcggtgtcagcgccatgatgcatggttacatgcctttcaatgaaaaagaagaaatcctcgtgcctttccgcacttggagaaataccaatacaggccgtgctgcggcagaattatccgaattatttgtctataacatccctttgagatggagcatttctcatttgtaccaggctattctggacaacgaagcgcacgtcaaagacatcaagttcctgacaactcttgcaggttatgtacattggcagataacaggcgaaaaggtgttgggcattggtgacgcatcgggtatgctccccatagatccgactaccaacaactattccgccgaaatggtggccaaattcaacaatctgattgcttcgaaagaatacagttggaaactggaagacattctgcccaaagtattgtcggctggtgaaaatgccggtgtcctcacaccggaaggctgtaaaaagctcgatgcatccggtcatctgaaggcaggaataccggtctgcccgccggaaggagatgcaggcaccggcatggtagcaaccaacgccgtcaagcaacgcaccggcaacgtatcggcaggtacttcttctttctctatgatcgtattggaaaaagaattgtcgaagccatacgaaatgatcgacatggtcaccactcccgacggaagcctcgtagccatggtacattgcaacaactgtacttctgatcttaacgcatgggtcaacctgttcaaagaataccaggaacttctgggtatacctgtagatatggatgaactctatggcaaactttataacattgcccttaccggtgataccgattgcggtggtctcctctcctacaactacatttcaggcgaacctgttacgggacttgccgagggaagacctttgttcgtacgttcggccaatgacaagttcaaccttgcaaactttatgcgggctcatttgtacgcctcagtcggagttctcaagattggcaacgacatcttgttcaacgaagaaaagatcaaagtcgacagaatcacaggtcacggaggattgttcagaaccaaaggagtcggtcaaagagtacttgcagcagccatcaactcgcccatatctgttatggaaacagccggtgaaggcggtgcatggggaattgccctgctgggttcttacctggtaaacaataaaaaggggcaatctcttgccgatttcctggatgaaagtgtatttgtcagcgatgctggtgtcgaggtatcacccacacccgaagatgtagccggcttcaacacatacatcgaaagctacaaggcaggtttgcctatagaagaagcagctgtcaaattcaaataagcggcttcacggagacctttctccccctttccctgaatttagtattaacataaatatcctcattccctctcctttttggagggggtcagggggaagctattatcatgaaaaccacctcgttcatacttgcccttattatatccatctccatcggaaaagcccagacgaaccatcaggtctcttacttttcccttcaagatgtgaagttattaagcagtccttttctgcaagctcaacagactgatttacattatatcttagctctcgacccggacagattatcagctcctttccttcgcgaagccggactgacacccaaagccccaagctataccaactgggagaatacaggactggacggtcacatcggcggacattacctttccgcactttccatgatgtatgccgccaccggagatacggcgatataccaccgtctcaactatatgctcaacgaactacaccgtgcacagcaagctgtcggcacaggatttatcggaggaacacccggtagcctccaactttggaaagaaatcaaagcaggtgacattcgtgccggaggcttcagcttaaacggcaaatgggtacccctctataatatacacaaaacgtatgccggactgcgggacgcttacctgtatgctcacagcgatctggcacgtcagatgctgattgatcttaccgactggatgattgatattacttccggtcttagcgacaaccaaatgcaggatatgctccgcagtgaacacggcggcttaaatgaaacgtttgcggatgtagcggaaataacaggcgataagaaatacctgaaactggcacgccgtttctctcataaagtcattctcgacccgcttatcaaaaacgaagacaggttaaacggaatgcatgccaacacacaaattcctaaagtaatcggatacaaacgggtagccgaagtttcaaagaatgacaaagactggaatcatgcagcagaatgggatcatgcagcccgttttttctggaataccgtagtcaatcaccgttccgtgtgtatcggcgggaacagcgtacgcgaacattttcatccatcggacaactttacgtctatgctgaatgacgttcagggaccggagacttgcaatacttacaacatgctccggctgaccaaaatgctttatcagaactccggagacgttgacaactccaacaaaccggacccacgttatgtagattattatgaacgtgcactctacaatcatatcctgtcatcacaagaaccggataaaggcggattcgtctactttactccgatgcgtcccggacattatcgggtatactcgcaaccggaaacatcgatgtggtgctgtgtcggttcaggcttggaaaatcataccaagtatggtgaatttatttatgcgcatcaacaagatacgctttacgtcaatctttttattccttcacaactgaactggaaagaacaaggcgttacattaacgcaggaaactctcttccccgatgatgaaaaagttaccttacgaatagacaaagccgctaagaagaacctgacattaatgattcgtataccggaatgggcaggaaactcagaagggtatgaaatcaccatcaacggcaagaagcacctttctgacatacaggcgggaaccagtacataccttcccctccggcgtaaatggaagaaaggagatgttatcaccttccatctgcctatgaaggtcagcctggagcagattcccgacaagaaagattactatgctttcttatacggtcccatcgttcttgcaacttctacaggaacagaaaaccttgacggaatctatgcagacgacagccgcggcggtcacattgcccacggccggcaaacacctttgcaggaggtcccgatgctgatcgggaatcccgattctatccgccattctcttcacaaactgagcggaagcaaactagcttttagttatgatggaaacgtttatccggcacaaaagagtaaatcactggagcttattccgtttttccgcctgcataattcccgttatgccgtttacttccgccaagccagtgaagaacagttcaaaacgattcaggaagaaatggctacagccgaacggaaagcgaccgaactggcgaaccggacagttgacctgatcttccccggtgaacagcaaccggaatctgatcatagcattcaatatgaagcttccgaaaccggaacccacaaagaccgtcatttccgccgggctaaaggttggttcagctataacctgaaaataaaagaagaagcaagccagcttatgatcaccgtacggcaagaagaccgtaacaaagcagtgatcctgctgaataacgaaaaactgaccgttcatcccactgtgagcaaagccgacaaagacggttttatcagactctgttatctcctgccccgtaaattaaaagtaggaagctgcgagattctttttaagccggacggaacagaatggacctctgccgtttatgaagtacgcttactgaagtaaccgtaagaacaagagaatgatcatcgtaaaaatcaaacttctatataatcatttaaacaaattccatttatgaaagcaaaactattagtcagcacggcctttctggcagcctcggtatctctttctgcacaaaagagtgctaccatcactgtacatgccgaccaaggcaaagaaattatcccgaaggaaatctacggtcaatttgccgaacacctgggttcatgtatctacggtggtctttgggtaggcgaaaattcggatattcctaatatcaaaggataccgcacggacgtatttaatgcattaaaagacttgtctgttcctgttctccgctggccgggcggctgctttgcagacgaatatcactggatggacggtatcggtcccaaagaaaaccgcccgaagatggtgaacaacaactggggaggaacgattgaagacaacagtttcggaacacacgaatttctgaacctttgcgaaatgctgggctgcgaaccatatataagtggaaacgtaggcagcggcacggtagaagaactcgccaaatgggtggagtacatgacttccgacggtgattctccaatggcaaatctgcgtcgcaagaatggccgagacaaggcatggaaagtaaaatatctcggtgtaggaaatgaaagctggggatgcggcggcagcatgcgtcctgaatattatgccgatctgtatcgccgttattctacttattgccgtaactatgacggtaatcatctgtttaagatagccagtggtgccagtgattacgactataactggacggatgtactgatgaatcgtgtcggtcaccggatgcaaggtctatccttacactactatacagttacaggatggagcggcagcaaaggtgcggcaaccaaattcaacaaagatgatttttactggacgatgggcaaatgtcttgaagtggaagatgtcatcaaaaaacattgcgccatcatggacaaatatgataaagacaagaagattgcccttttgcttgacgaatggggcacttggtgggacgaagaaccaggaacggtcagaggtcatctgtatcagcaaaacacattgcgtgatgccttcgttgcttctttaagcctcgatgtattccacaaatataccgaccgtctgaaaatggcgaacattgctcagatagtcaacgttctgcaatctatgatcctgactaaagacaaagatatggtacttactcctacttattatatatttaagatgtacaaagtgcatcaggatgcaacctatcttccactcgacctgacttgcgagaaaatgaacgtacgcgataaccgtacagttcccatggtcagcgcaacagcttctaagaacaagaacggagtgatccatatttctctctccaacgtagatgcagacaacgcacaggaaatcacagtcaatcttccggacgtaaatgccaaaaaggcgattggagaaatcctgacttctgctaatctgactgattacaactctttcgaaaaacctaatattgtaaaaccggcttccttcaaagaggtaaaaatcaataaaggaattatgaaggtaaaactaccggctaagtcaattgttactttagagttacagtaatctaatagtaaatacttactgtattataaacaagaaggctgttaaaaagcctacaaaaaagatagctcttttggatggttaattacacataaagagctatctttgccaacattatgagaaatatgccaagtaattggcacattgacagactagcaaatctattaattattaaagatatgaacgataataaacttatgaatcgtgcagcggataacatccgtattcttgctgcttcaatggttgagaaagccaattccggtcacccgggtggcgccatgggtggtgctgactttgtaaatgtactcttctctgagtttctagtatacgatcctgaaaatccgcgttgggaaggtcgtgaccgtttcttccttgatccgggtcatatgtctccgatgctctattctacattggcattgacaggtaagttcactttggacgaactaaaagaatttcgccaatggggaagccctactccgggacatccggaagtagacatcatgcgtggtatcgaaaatacttccggtccgctgggacagggacatactttcgctgtaggtgccgctatcgcagctaaattcctgaaagcacgcttcaatgaagtaatgaatcagactatttacgcatacatttccgatggtggtattcaggaagaaatctctcagggtgccggacgcattgccggtgcattgggactggacaacctgatcatgttctacgactccaacgatattcagctttctacagaaacgaaagatgtaaccgttgaagacactgccatgaaatatgaagcatggggatggaacgtactcagcatcaatggtaatgatcctgacgaaatccgtgcagctatcaaagaagctcagacagaaaaagagcgcccgactctgattatcggtaaaaccgttatgggtaaaggcgcacgcaaagcagacggtagcagctacgaagccaactgtgctacacacggcgctccactcggtggcgacgcctatgtaaatacaatcaagaatttgggtggcgatcctgtcaatccgttcgtgattttcccggaagtagccgaactgtatgcaaagagagcagcagaattaaagaaaatcgtagctgaaagatatgcaaagaaggccaaatggaccaaagccaatccggaactggcagctaaactggaagcattcttctccggcaaagctcctaaagtagactgggctgccatcgaacaaaaagcaggtactgccactcgtgccgcttctgcaactgttctgggtgctcttgcaatgcaggtagaaaatatgatcgttgcttctgccgacctttctaactctgacaagactgacggtttcctgaagaaaactcattctttcaagaagggcgatttcagcggtgcattcttccaggccggtgtatctgaattatcaatggcttgtatctgtatcggtatgtcacttcacggtggtgtgatcgctgcttgcggtaccttcttcgtattctccgactatatgaaacctgccgtacgtatggctgctctgatggaacagcctgtgaagttcatctggactcatgatgcattccgcgtaggtgaagacggtcctactcatgaaccggtagaacaggaagctcaaatccgcctgatggagaaactgaaaaaccacaagggacacaactctatgttggtacttcgtccggctgatgcggaagaaacgactatcgcatggaaacttgccatggaaaatatgtctactccgacaggtctgatcttctcccgtcagaatatcgctaacctgcctgccggaactgattacgaacaagcagccaagggtgcttatatcgtagccggttcagacgaaaatccggatgtaatcctggtagcttcaggttccgaagtgtctactttggtagccggtacagagttgcttcgcaaggatggcgtaaaagttcgtatcgtatctgcaccatcagaaggtctgttccgcagccagtctaaggaatatcaggaatcagttcttccggctgatgccaagatattcggtcttactgccggtttgcctgtcactcttcaaggtctggtaggttgccacggcaaagtatggggattggaatctttcggtttctctgctccttacacagtattggatgaaaaacttggatttactgccgagaacgtatataatcaggtaaaagcaatgatttaatgaaaacaattggattagcatgcgaccacgccggttttgaactaaaagaatatgttcgcggctggctggaagtaaaaggctgggcttacaaagatttcggaaccaactctgccgcaagcgtagattatccggactatgcccatccgctggccctagcagtagaatcgggtgaatgttatcccggtattgcgatctgcggcagcggaaacggaatcaacatgactctgaacaagcatcagggaatacgtgctgctctttgctggaatgcagagatcgcacatctggcccgtcaacataatgacgctaatattctcgtgatgccgggacgcttcatcagcactgaggaggcggacatgatattgacagagttcttctcaacacagtttgaggggggacgccatcaaaatcgtattgataagattccggtaaaataatgcctgaaaatctataaaaataaggtggaatatttaataaatatcccaccttatttttaaaacatgaggctcaaggaatatataaccatagtctttgtcttcattttccttctatatctttctcaagttaaagccatctactataacacatctgttgaagaagattgctatatacacttatgactaagtttaccattgaacaatgtaataagacaatcctatttccaaagagggaacaattaaatgaaatttttcacgagggcgtatagacaattcacctatactggtatttttgtgaagtcctttaattttagcatacaaacaattcacacccaacctaattcccaagcgggagtcaaaagcatattcataagcaatccccatattgcctcccactgtcgaacatgttgtattataattctccaactgcgatattgttcccttacttctataattaacatatccaataccagcactcacatacataatcccatccaaaaatccagcctgccgtttaataaaagaaatctgcggagctacataatagaacgattttttttcattgattcccgatgatagcactccatcatgtttctttgtaccattactatagtcataataaaacaatccacatcctatattactgtaaggggtataagtcatcaattgtattgaagaaacaaaaggaacatcatttttattatttcctatataccaagagctgcttccatttttttgtataccagtaaaaccaatccctaacccgacatccaagatatatactcgtttatatgactcgttattagttgaaacattcagtgaatctttctgagcatacaaagagttgatactgaacatcaaagatattaatcccactagcaggcatttgttttgtttcataataagtgtgtttaataaaaagagaaaaaacgaaagctcccttaatcaatcatcattttgtttcaacccacaaaaatttgctattttcagcaatagctatcatagtttttaatcgagaaacagctgatacatctaaagatgaagcatcaatttgggcatatacttgtttagtataatcacgaacagttgatttatcatccatattcactaaaccattaatataactctctacaagctgaaattcagatactcgctgaggaaattcttgcttcattaaattcatcagttgatcaacagaagtacttttcttaaccagatccattatttccagcaatcttgtctgaagcaacaggggcatttcttctgtatatccataacttttcaattttttgttagtagaattatataaataataattagaaaaagtaccattagctattacgggatcttccctcatcatattatatattgtcttattatgatcatttccaattatttcataaggtcttaacggagcatcgtataccttccaatttgaactcaaatgccaccaatttctaggaagatcatcatctgaagccgcagaaataagtgagaatacaacagccgtaatcaagccacctctaggtgttaaacctttatttactccccaaccataaccccaagcatctcctacaagaaaacgctttattcgattccaaaagggaccacgagtctgtattttattagcattcaaggtttctataaagtctattaactcttgaatttcaacatcttgtgttttttcttgattttgttgtgtatttataacaacatcatttgagtttgaacaagaataaaaacaattcattacaagtagtaatgagacacaaaatacaatttgcttaatcgtcttcataatttcaatttttaaagtaggtactattaaagaattacattgcatcatttttctatttgccattataccaaaagagaactatatgatactaatttaacaccaaatatattcgttatttttgtaacgtccaacttattatcgcataaagtgtaataatttcatcctctccagtacattatccgccgagatattttatataatatgccattaagatcaatgaaatgttcagtctaaaatccttcacttacgttgattctagtgcgtaaaatatcatagatacaattatgacacatagttttttataataatcatctattttttatgcaaacttcaagattacaaaagaacaataatatcgtcttactatatgacgaagttaaaaaacagaagttatgggtaaactgaatatgaaagactggatcggtcagacgatcctgaataaaaaggtcatttccattcctatcatgacacatccgggcatcgagcttatcggaaagacggttcatgatgcagtaacgaacggacaggtgcattatgaagcaatcaaagcgctctgcgacaaatatccttctgctgccgcaacggttattatggatttaacggtagaggcggaagcattcggagccgaaattgtatttccggagaatgaagttccaagcgtatccggtcgtttgctcgcagacgaagctgccattgagaccttggaaataccggcactgaataaaggaaggattgcacaatatctcaaagcgaatatgctgactgcaaagaatatcacagaccgtccggtgctggctggttgtatcggtccttattcattagcgggacgcttatatgatatgtctgagatcatgatgctgatttatatcaaccccgaggcagccaacactttgctgcgcaaatgtaccgatttcattattcggtactgtatggccctgaaagcgaccggagtgaatggagtggtaatggcggaacctgctgccggattattatccaatgaagattgcctgcaatactcttctgtattcgtaaaagaaatagttgagaaggttcaggatgatcatttcaccgttgtacttcataattgcgggaatacaggaaattgcacccaggctatggtatatacgggtgcggcagcctatcatttcggaaataaaatcaacatggaagaagcattgaaagaagttcctgccgatgctcttgcgatgggtaatcttgatccggtcagcctttttaagatgttgagtccggaggaaatgaaaaaagcgactctccagttattggaagccacttccgcatatccgaacttcgttctgtcgagcggttgcgatataccgccatatacgccattagctaatataaatgctttttatacagcattggaagagttcaatgaaactcgaaattaggccgtcattcagctaatgtcagttaataatgattgagcaagaactcacttatcaagacttacgaatcctatcgtccgaaatttatgaagcgatggggtacaaagattctataccggatcagatggtgatagatgagactaatacgttgctaaaacgggttattcccctgcttcgccctcggttcgcattcttctttatggaaggtacacttgatatcgaaaaagagactcttagcgtacaaagcatccatccacccactgtcaatcctatacaagacaccattcccacacggagccctgagcaaaacactttttctacacaaagtaaaagtaccgttttctctgttggtaaaaccatcgcccgtcaattaagaggatcggaagcgtttgtcttttttgcagctactgccggaactgagtttgaggtattccagcatacgttgcaacaagaagaagatatggtcaaaatatacatagcagactcgttagggagtattattgcagaaaagacggctgattgcatggaagtcgctttggctgaatatatacgggagaagaactggaaacataccaaccgatacagtccaggatactgtggatggcacgtttcggaacaacaaaaactgttcccattgttccccatagctgctcccggtggcatccggttgacagattccagcctcatggtccccatcaaatcagttagtggtgttatcggaacaggcactaatgtccgcaagcttgaatacacttgcggactgtgcacctatgaaaactgttatcgcaaaagaaaacacagataaatttgcgattgggggctgactaaaagtcggtagtaccaccattctcctccttcgggaaggaggagacttaagatactatcgactttttagtcagctttatatcttctttaatggccattaaagaagatataaagccctatcatagttacgataagcaacccccataagataagtacaatgcgggcaggcttttcttcgatcttctccatattcaatattgccgtctgaggagtcttatccaatagaccgacaactaccatccctatcccgataataacgaacagatagaaggataataacataaaatgaggccatgcagaatattgatccgcaggaaatacccatagatacaatacacctactcctatactgaataccgtccccactgtcagggcagcgttagcagccaacgtagtcgtacgcttccagaaaacgccaaaaaggaaaactgccgccataggaggtgcaatgaatcccaatacagactggaaaacattgaataaattcagtccgtgaatgctgtcaatggcaatcgttatgattaccgatatcagagcaccggctaccgtcaccacttgtccgacccggatgatctccttctgcttcgcctgcgggcgaatcttcttcacataaatatccattgtaaacacggtactcaaagcattcaatgccgatccgatagtactgacaagcgcggcagtcaacacagccaacaccagccccaccatcccgacaggaaacaaatgggttaccatcgtcatatacgcctcatcgggattctccaactgcggaaacaaggccagacagatgatacccggaagaatataaagaggaacatccagtattttgagccatccggtaaagttcgttcccaactgtccttctttcagacttttggctgccaacacaggctgtaccatcgactgatccgtacaccagaaccatactcccatcacaggatatcccaaaataatcggcaaccaagggaaagcggtatcatcattcggtctgaacagattccagaagtctgccggaacggcatctgtcagagccgatataccaccaactttatagattcctacaatagccaacgcagccgaaacaagaatcaacaggatcatctgataaacattcgtgtaggcaaccgctttcaatcctccgagcatcgtaaagaatgcggatatgatcagcaatatcaaagcggactgccacatcggtatatcgaatacctgacgaatcagaacgccacccgcaaacaatgtcaatgctagccaggaaatcaagattgtaacaatcgtataccatgccaagatattacgggtagactgtccgaaccgctttcccataaactccggcaaggtggaaacacgagaacccaagtaacggggagcgaaaacaaaagcaagcaggcatataaaaacgaaggcataccaggcataattgcccgaaacgatgccggtagtaaatccggcgctggcagaagctatcaacatagacggccccacattagtcccccacatggagaatccgatgtggtgccatctcaaagaatgttccgccaaaaagagactgctccccttctttcgtttggaacttgcccatataccaatggcgataagaatcagaaaataggcaatcagaatgccccaatccagtgtgtctaagaatttcgcgtgcataattcaagtattaacaattaaaatattcttaatctcttttccccatcagcactttggcgaccgccacggcagtattagcattatcactatacccgtcagcaccgatttcatcggcaaatccctgactcacgggtgctcctccgatcatcactttcacctgatcgcggatccccgcctcttccaatgcccggatcacatcctgcatataagtcatagtggtagtcagcaaggcactcatacataaaatgtccgctttgttttccttcaccgcttcaacaaacttgtcgcaagtaacatcaataccgatattaatcacttcgaagccacaaccttccagcatggaagccacgaggttctttccaatgtcatgcaaatctccttttacagtaccgatcacaattttcccgatagtagcagatgcattccccgccagtaaaggtttcaaaagttccaaagctcctttcattgcacgccccgccatgaggagctgggggacaaaggccttgccgtcctgaaagcgctggccgacttcgcccatagccgtaatcatatagccgttgataatatcctgcggaagcactccggcagcaatggcatcctttgtaacttcaacagccggttccagttttccggctacaatggcatcatacaaaggtttcatccgatcctcttcctgagacttttcttctctgatccgaatactttcctgtgcattatcctgttctccaacgggttgattcgtgtgaacatctgcagacacagacgaagaagagccggtatattcctcaatgattctcattgcctgctccacttccctctcattgtggaaatccatttccagatgcactccgtctgccccgatatggtccaacaaaggtttcagttcctccagagtcacccagcaagccattacgctcttgcctcctgccaatatcttcttatataaatcgtaccacttcggagaacctccctgcggctcgccgacaccgggcgtccattggatggcattcagttcttcaatctccagcaaggcgggaagatgatgcatcgctcccactccatcaagatgatagagcgtataatcgattttctgacattgctcacgaataaacggctgcacaaaacgacgataatcatcctgactgatcatggtagaaatatcgctctgcaacttactcatcttgcccggagcccatgaagagaaatagcagaatgccatttcatccccttcacggataatgtcgtagagttcatcaaagactttaaaatagatgtcattgatctgctgcatctgttgctccagcacttcgggttgcatcaccgtatccagcaataccatatccgtacctttcaaagctgccaatacatccagtccttccatcaggtcgggcataccaacaaagtagtttccgttggctttagccttacaggctttcagaagttctttatgcaagagccagttcggatgttcgggattgaatacgatctcatcattaaagttcggatcgggatgtatccagatcgtatcttcgcctccttcaaatactccgcccagaatagcagccagcgagccgggacccaactgagtatttgcaacaggcagcatatccgccatcagactactgtgagcgacataccaatccagatattccgcccgccattgagggtcgaaccacttctgcgacaaatcccttgccggagcaggtggagcaatgtcggcgtgcggtttcacgccttcctgaaagtgttcccacatagaaagaataattcctttatgattccaccaatttatataacgctgtttcgtttcttctaagtttgttttccaagttttcatcgctattctttatttagtccaaaatcctttgtaattatgatctatgcgcaaggcaatacttttgcttaaatccatctcgtccgtacaattcacttcctccggataaatcgggataacggcattctcacgcacataaacaggcatctcttccaagggcacatacacctctttcagccagcgtccgccttgcaaccgttcgccggtaaagaaattcacccactgtccttcggggagataaatgtcgcgacggttttcgctattcatcaccggagctaccaggaaatcattgccgaagtaatattcgtcatcgatatgccagcagagtttatcttccggatgatgcaggatgagtgcctgtaacaatggccagccactttctactgccagtttactttgctctatgatgtagggaatcaacgagtaacgcagtttccaccacttcttcaccagcggggcgatagccggataatgccagggttcccgcttattggttccatgataacggatatgtgaggtgaacactccaaactgggtccagcgcatatagacgtcatccgctacgattgagttcataaaattgggcaaggtatggaatccggggacatcatggctccagaaggcaaagcccgataaaccgaagtgcaggcctcctttgagtgaaccggccatgccatcccatgaactgcaggagtcacctccccagtgcaacggataacgctggcaacccgcccaagcggcacgtgcccagacaatgccgtcccctgttacctcctttgttatttcgtaagctgctttctgatagagcaaggcatacaggttattcaacagttccggtttcatgcccttgtagacagcatccatgtggatattttctccgaaatcggttttaatacaggtgactcccatatccagaagttgctttaatagccccttgtaccattcggttgccttcggataagtaaagtcgatagtacccgcataatccagagccgagaagttggaaccgtccgtgtcctgctgcttcgtcagaggagctatatactcattcgcctttgcctcttcgatctgttccgcatcttcagcaacataaggtaactgccataaggacacacgataaccgttcttcttcaatctctgaatgaatcctttcgggtcgggaaaacgttcctcgttaaacttccattcacacagccagtcggttctgaaccatccggtatccagatggatgacatcgcagggataatgttcggcacgcatacggtcgcagatctcatttacttcgtcggcactgaaataagtcatccggctcatccacactccgaagctccagagaggaggcatcgaaggatatccggtcaggtcacggtagccgcgaagtatctcttccatcgtatcgccggcaatgacaaatgcatccagcatagcctgatcgctcaggaactgtacggagcgggtggaatgtcccgccagcgaaagtttgctgtgggcgcaggtatggtaaaaagtcccgtacatccggctggagagatagaaaggtatattcttataggtacgccggttatttactccctgcccgtcctgattcttgaggaaaagcgtttgtccgctcaagtccattttgaagaaacgctctccggttcctgcaaagcattcgtccggccggctctcgaaagaaagggtggcacgttcctttttgcccgtccgtttgcagaaggcaatgggcagtccgtcatagcggggaggtgagaaatgatcgtatgctgccaggcggatttcgcgtttgccgtcaggatacagagtgatgtccagtgtttcctgaggatcgggcagtaactcgctccatcggtccaaagccggctcttctacattgatagcggcacgcttcgtcccgtcttgggtgaaaagaatccatttgcctccctgcttctctacagacaaaggtactctgcgaatccgttcgctgaattgcagcatttccgactgatctgtcagttcatattcaccaaatccaagaaacagacgggtaatgccgatattatactggcgtatgatcaacgtatattcttctcgggggacagccgtatccgcagccatatcattggctgacagctgtttctgaaagggaaccgtgacacagatatccccgtccctttcataaacggctgtcggtttacaggctttccaaagtgactcatcccttgataactctgtatcgaaatcaaggaaatcgaacaaatggtaattagtaggtttcatttatgatctattattattagttttatcttcatgcagacttcacaagtctctatggccccactttttgcacagtccgacactgcgataggctcagtgtcggactgtacttactccggttttatccttccggccttattcttaatgctttctgtcacttgtggtccgttatttttccatacattccgattgccgggacgattcgagtcgaaacgttcagtcggacaccagttgttttcaatcgtatatccgtccgtagcttcatccaaataaatataaaaggccctgtcattggtggcgtaagatgcttcttcgagatgttcgatccgattattccgcatcacggagcccggttggttggaaagcgtataaagtcctccggcatcatacagacgacgggcaaagtgatgtacgtagttggcttctatccggttgtttttcattccgctttccagcgatgtccacccccagccgacacaaatacccgaataattcaagtgacagacttcattatgggaaatgtcgataccgctgacgtatcccgcaccgatccccacgcacccccagtcttcattggtcacatcggtgatcagattatttttaatgttaatgtccgtgcataggttacgttcttccggagggatgaaaggcacatgcgtctcaaaacctccgtcggggaatgcaccaatcagtatgcctgtaccgccgatatccgaaaagacacaattctctatgccagaagatgaaacagcccattcataatccagtccggtagatgccagatgccggaacctgcagcgactgaacgtaagatgctcagtaccccgtacacgtattgccgtttcggggcgtgcaatccacgcctggttctccagttccgctttctccggaagtcccggttcatgcagtttataagcatccagcagaggaaaacctccttgcaaagtgacatgtccctgataggaaggacgcatccatgaagtatgggcaaaggtgattccttccactcgaatatgccgcaccgggcgttccaatgtgccgtctacaatcatcaatgtttccagagcaggaacgatcacttcggcagtctccatatcttcttccgagcggggataatagtagattgtccccgacggatattcctgaaaccactctccgggttggtccagcagttccagagcattcgtcaggcaaaaggaagagttgcctttctctcccccgatgatgggctgaggccacggatgggcaaactccagatgactctccggttcgtgaaagcgaatgacggcctgttctcccctgacgtctatactcttcacacgcagaatggcaatcgcccaacgttgatgaactatcatttccagtcgacgggcattggggaggtttccgatctgagaagcagggattattatcgtctgttcttccggattgaaatcaatcatccgttccatcactccatcaggaaactgtgccgcccgctgggccttgttaccatctacccacatctggcgggtttctacgattctatttccaaaggatggcgcctttgccacccatatttttgatcttaattcctttgcaatccgaggatcatcacatccctttttccatccggtcactgccactccgccactgatgacaggatgcgcattctccaccgcacggatgagtgtcggagaatcgggcgtgccgctatcctccggtcggataaacaaaggagcggactgtgcataaaccccgtcttccaaacagatacaaattcctccggccgcctcgggacgattcagccttctccattcacgagcctgcttgatggcgcgattcaaggtaagataaggagcttctttggtacctgcattcctgtcactcccatgcggagaaacataaacctcgcctgcgacgagaacggaaaataaacctaaagaagccataaaaagaagaacaacgattgtctttttcatggtacaaactcaatgtgctattatagttaggacgggcatacatcaatttagtactcgaataggatgaaaataataaaaatgccattgctacaattggagtactttcagtattcagactattcagttttactcgcaaacgacttgatagaaggggatagcggctgaaggcactattttgtaccctgtctttaggagcttctaaacggtgcaagtggcttcagtcctttcatcctcaataataaatccatagttaattggttatagctctttgcatgcaagttgtagctactccgcatgcgaggtgaattttataagctcggcgctaaacgtcactcagtaccgaggcgaagggtactcaacaccgagggtaagattggtgggataccggcttacttcaaatcaataaactaaccaatagttcagataaaaaacagaaggtctgtttacctcaaacagagcctgtgtttattccaaacagaacctttgtttgagataaacacaggctctattaagtcagtaactaccgacgttcgaatggattatttttcaggctgaagggactgaagccacttgcaccgttcagaagctcctaaagacagggtataaaatgcccccttcagccgctatccccttctgactgggcatttgcggacaaggctgaaaggactgaatacggaatgtcgtttctttgttggcgaggtcgagttttgcccctttttgttccgaaaagaagcaaaaacttataattcaaatccgtacaaaacgaattctatgatcgaataaacccgactataaactgataacagaaatagccacaaactacaaatttcaggaatgttcccagtagaaatccaatcaatgatcctacccccgatctaagtgcttgagaaaactctttattccctagcaattcgccaataactgctcccaagaacggaccgaaaatcactccccaaggcaggaaaagaaggccgataagggtcccgatgatacatccccaattgccccatctgctaccaccgctatacttgctgccaagcataggggtgaagtagtccaagacttgcacgacaagaacaatcagcagccatacaataagttgtgtggtagtgtattgaaccttatccgtaaaatgaagaaggaccaatcccaaataagcaacgggaggaccgggcagaaagggaagaatacaccccatcagtccggtaatgaggcatagcacccctagtataatcagaataatatctaacatcgttttatttcatttgaaagacgtactttatatccggtggcaatttaagcaaataaaccgaatcctccaaaaaacaatcagtaacgccgggaaggagtataatcaattctataaatacgatcgaagaaaggactccattcattctccgcaatcccaagttgcagaccgtagaaatgcgtatccacttttctatattccatcatcttgtctgtcagttccggtacggataaaggtatcttaaaatcactgatccatagcacatccgcattcatatactccttttttgactgaagcagccggaaagtagcttgcagcattcgggtagcattcgtatctccacaagaggtggtggagaaaaattcaagcagccgcgccctctctctccgcacatcaatcggattgatggatacagaaaaggcaatcaggaaacagtcccgacgttgcctgtcagctatttccagtattttaatcagcagcgaatatgcaatcttttccggtttcccgaccatgcttccggaagtgtccagacagactatcatcggccctttctgcgtagcaggctttatttccaatcgccgtgccggttgcatgatctcggatttataacggaaggtctgaagttttcgggtaacgtacttatagacaaacaaatcttccagctcatcatcggcacaatgcgccagttctgtaggaagcaatgcgttcaggtcattccctactgtgatacccaaaatgtcacttttagaagaatgctccatcttatatacattcccctgcgcgacatgcaactgctcctgtccttcatcgtcagccatacgccccatcttattggcaaccttgaccacttccggatattctttctgaatgcggacgattttgcgtatccgctcaaaatccaccgtattccacataccgctcatcaagccccaagcctgatagaactcgtctttctcgatgttattttgccggatatatccggggatattcctgagattggcatgaagtctgcgttcgaaatcatctttgcgctgttctatctccttttccttttgctcctgcaaatcccgttggaaagcttctttccagtcgtccaccatcctctcccaaacttcctcatccgcatatctcccttcattgccgaactgcccctgataaaacgccctgtcgaaaccattaccttcatgtttgccggcaacctcctgcagtaaagcctgccatccgtctttccgcttggtctcggaccattccagcacaagttccattccttgctgttccgactggcttttctgcatattgtacttttgcttttccagattcagccggataaactggctcatcgcatcgtaaaagattcgggcacatagttcatcactcaggacttgtatctttatcatcggatcgttcataacggaaagcaggtaagcgtacaacggttcattatccgcctccgcacactctccggtcgctacatacttatccagcacctgcacataaaatgcagcatcatatctaagactcatcgccgtatctcagtttacggacatccacccgtgcccatgcaatctctttacgaagggtcgccacatattgtgccaccccttttttatcttcttcggaaataaaaatattctcagacaagtcttttactaatttctcaatccggccgtgggctgtctccaactccgtctcataatcccggtcggtgagagtcatattgcccagccacaactgctgttgctctcccctcttcagccgacgcatcggaaagcggacaccattgatataaagattcttctcatccctgtaaagtgtcaccctttcggcaccttgttccttcattttggtggcatccgaaaaagtacgtataatcgttcgcttcggattcagcggatcggcatacatgactcctgttgcaggaacatccttcggactgtattctttcagattcttataatccacaataaatatgtaggtatttcccgtaccatgattctctatctgatagtagaaatgatcgatgatcatcaaatcatcgtctctgcggtcacctttctgacgggctttctccaatgcttcacgcacgcggctcactttcaggtccgactttaatgataagttgatagcggctatctccttcacataaggaacaaacagcgcacggacaacgatctgccggatatccgcacactcttccggttcattccacaagcagtggtaaacaggtaataaatctgtcagacagacttccttccgaccatgaatgaaagcagaagctttcagcagcttcacgatattcttccagcgacggtcgctcacatagacattccgatgtacttccgagccttgaatctcgactttctccaggttcttacggatttctgtgatgcaggacaggacttcggcagataccttgatctgccgtatctctttctgccatccagcatattcctcatccgaaatctgccaccgacatgcttcctgttcttcttcgtcatcatcgtccagcaacatttgatagaacgcttcctcctgtttcacgcaagtgctgataatgcgaatcaagaaacggtcccacaaggcttccagtccttcgccctgcgtaggcagttcattactggcagccaccagcagcttcaacggaagtttcagttccgtatctccattccgaaacagcttttcattgatgaccgtcagcaacgtattctgaatagccggaccggctttccatatttcatccagaaacacgacatccgctgtaggcagatacccgtccacagcacgctcgtatttatccgattccttcagacggctgatgctcaccggaccaaagatctcatcaggtgtggagaaacgagacatcaggtattcaaatgcccttgcatctacaaaagctctcttcaaccgacgggccaccatcgactttgccaccccaggaggtcccagcaacaaaatactttcgcccgccaaagcagccagcaaagacaaaccgatttcagcctctttctcatatacccccctgttcatttcggacagcagcaactgtatacgttcttttatttccatattattctttgattctgcacataaataaagatgttattcaccttaccgcctatgcattgtttgcagataaacggcttgcaaatatacggttttacctgtcattaacataaatacatcttctctaattctgtcttttatactcaagaattatcttaaggcatatttaatattgattatttattcacccaatatgcaataaaaacaaaaggaggtaaatttcctttctcattttcccccatttacataaataaaaactatctttgcgattcagaatcccgaaagacgaaagaaaatggagcaaatagacaacctaaaagagcttatcaatcaaggggatgtggacatagcaatcaagcaactggaccaacttctccaagacgattctgtcgagaaagataaagatatgctctactatttacggggaaatgcctaccgaaaaaaaggagattggaagcaggcactggataactaccagtatgctatcgatcttaatcccgacagccccgctgttcaagccagaacaatggcgatagatatcctgaatttctaccacaaagatatgtataatcaataaccgaattcaaagataacgtaataaaatagagattatggcaaaaattaaaggagcaatcgtagtcgacacggagcgttgcaaaggatgcaacctatgtgtagtagcgtgtccgctcgatgtaatcgccctcaacaaagaggtgaatatgaaaggctataactatgcctggcaagtaaaagaagatacctgcaacggatgcagttcgtgtgcaatggtttgtcccgacggatgtatctcagtgtataaagtaaaagtagaataaaagaaaaagaatatggcagaagaagttgtattaatgaaaggaaacgaagccatcgcccacgcagctatccgttgcggtgcggacggatacttcggatatcctattactccccaatcggaagtactggaaacgcttgccgaactgaaaccgtgggaaacaaccggcatggtagttctccaggcagaaagtgaagtggcagctatcaatatggtatatggaggcgcaggtagtggaaagatggtattgacctcttcctcaagtcccggcgtgagtctgaaacaggaaggtatctcctacatcgcaggtgccgaacttccttgtctgattgtaaacgtaatgcgcggcggtcccggattgggaaccatccagccgagtcaggcggactacttccagacagtgaaaggaggcggtcacggtgactacagactgattgcccttgctccggcatccgtacaggaaatggcggatttcgttgcactcggattcgaacttgctttcaaataccgtaatccggctattatccttgccgacggtgtaatcggacagatgatggaaaaagtagttcttcctgcacagaagccacgccgcaccgatgcagaagttatcgaacaatgtccgtgggctgctaccggaaaagcgaaaggtcgtaaaccgaatattattacttcactcgaactgaagccggaagcaatggaaatcaacaacatccgtttccaggctaaatacaaacagattgaggaaaacgaagtacgcttcgaagaaatcaactgcgaagatgcagaatatctgatcgtagctttcggttccatggcacgtatcggtcagaaagcaatggaactcgcccgcgaaaaaggaatcaaagtaggtattcttcgccccatcactttgtggccgttcccgaccaaagccattgccgcctacgctgacaaagtgaaaggtatgctcgttacagaattgaatgccggacagatgattgaagatgtccgcctggctgtcaatggtaaagtaaaagtagaacatttcggacgtctcggcggtattgttcccgatccggatgaaattgtaactgctctggaagaaaaaataatcaaataacgaaacgacgatgaatcccgataaaataagaaacgtattgaacatccttttcatgatattggcacttgccgctatcattgtctactttgtagtaggaaaggaagattttaaaatgtttatctacgtatgcggcgcggcaatctttgtcaagctgatggagttttttatacggttcaccaacagataaggagaagaagttatgactaaagaagaaataatcaaacctgagaatctggtttataaaaaaccgactctgatgaatgataatgccatgcactactgcccgggttgcagtcacggcgtggtacacaagctcgttgccgaagtcattgaggaaatgggcatggaagaaaaaacggtgggagtctctccggtaggatgtgcagttttcgcctacaactatctggatatagactggcaggaagccgctcacggacgtgcacctgcagtagctacggctatcaaacgcttatggcccgaccgtctcgttttcacttatcagggtgacggtgacttggcctgtatcggtaccgccgaaacaatccacgcactgaaccgtggcgaaaacattaccattatctttatcaataacgctatctacggtatgaccggtggacaaatggctccgacgactctggtaggcatgaagagttctacttgtccttacggacgtgatgtcgaactacacggctatccattgaagattaccgagattgccgcccaactggaaggaactgcttacgttacccgtcagtcggtacaatcagtgcccgccatccgcaaagccaagaaagcaatacgcaaggcattcgaaaattcgatgaacggcaaaggttccaatctggtagaaatcgtatcaacttgtagctccggctggaagatgactccggaaaaatcaaataaatggatggaagaacatatgttcccattctatccgctgggtgatttaaaagataaagaataacgcaaaagtcaacagaacaatgaaagaagaaataattattgctggattcggtggacaaggcgtattgtccatgggtaaaatccttgcttattccggactgatggaaggaaaagaagtgagctggatgccggcatacggtcctgaacaacgaggcggaacagccaatgtgacagtgattgtcagcgatgacaaaatctcttcaccgatcctgagtaaatatgatacggcgatcatactgaaccagccttcactggaaaagttcgaaagcaaggtaaaaccgggcggtatcctgatctacgacggatatgggattatcaaccctcctacccgcaaggatatcaaagtatatcgcatcgacgcaatggatgctgccaacgaaatgaataatgcaaaagccttcaatatgattgtacttggcggtctgctgcaactccgtcctatcgtgactctggaaaacgtcatcaaaggactgaagaaaactcttccggaacgccatcaccacttgattcctatgaacgaggaagcgatcaaaaaagggatggaattaatccatgaagtctaaataattgacaattgacagttgacaattgataattggcaatgattgacaattaacggttatgacactataattggtaattgacaattgacataaaatggcaaaataacgcatacagacgttaattgttaattgtcaattgtcaattgtcattttttcctgtatctttgcctccaattatgagacgaatcttactattatatatattattctccgttgtaggactgagtgctatccatgcacagctcaaccctgcccgccaacaaatcgacgagaacggacgcgaccaatatggtaatcaggtagaccctgccatgattccggacaaactggatagtgccaatgttgaagtacagggattgccacctacactctacatgtggcgcattaaaaatcaattgggcgaccggacaatgattccggcagatacaacttatcatcactttcagaatacgaatcttacagaaggaatcaccggacattataattatctggccaacctaggttcaccgcgtctgtcgcgtatcttctttgagcgtcgttatccggagccaaccatctttatggagcctttctccagctttttcattcgcccgacagaatttaactttacgaatagtaatgttccttatactaacctgacctatcacaaggccggaaataagcaaaatggagaagaacgtttcaaatcttatttttcagtcaatgtaaacaagaagctggctttcggctttaatattgattatctgtatggccgaggctactataataatcaaaacacttcttattttaatgccgcgcttttcggtagttacattggcgaccgctatcaggtgcagggaatctatagcaacaactatctgaaaacgaatgagaacggtggtatcactgacgaccgatacattaccgcaccggaagaaatggcagaaggaagaaaagaatatgaatctgtcaatatccctaccgtactcaatgccagtgccaaccgtaaccatgacttctatgtctttctgacacaacgctataatctgggattccaccgggatattccacaggcagaaaatgatacgatgcctgccaaacaggaatttgttccggtcaccagctttatacataccattcaggtagaacgttcgcgccataatttccgttcggatgataatgtagaaaactattacaagcaaactctccttgataaagagaatacattcgtcagagacagtactgtctatatcggagtcaagaataccataggtattgctttgctagaaggcttcaacaaatatgcaaaagccggattgacagcctttgcctcacataagctgagcaaatattcattaatgagcctagacccgctaaagcaggataaatacaatgagacagaaatctatatcggtggcgaactgactaaaaaacagggaaactttcttcattatcatgcaatcggtgaagtgggaatggcaggaaaggctatcggacagtttgatgtcaaaggagatatcgacttaaatatccctttatggaaagataccgtcagtgtgattgcacgcggagaaatcagtaataaacttgctccattctacatgcgtcattaccactccaaacatttttggtgggatgatgatatggataaggaattccgcacccgtatcgaaggcgagctgagcatagctaattgggggacccgcttaagagccggcgttgaaaatataaagaactatacttatttcaaccagcaggcattaccggaacaaaaaggtggtagcttgcaggtagtatcagcttgcttcaatcaggatttcaaagtgggaatcttccatctggacaatgaagtgatctggcagaaatccagtgatcaggctgtacttccattgccggaactttcgctgtatcataacttctatatgcagttcaaactggcgaaaaaagtattgagtgtacaattaggtgctgatgtacgttacttcactaaatatgatgctccggcctatatgcctgctacacagcagttctacctgcaaccggaagaaggtaaagtagagataggcggttatccgatagtgaatgtttatgctaacttacacttgaaacgtacccgtttctatgtgatgatgtatcacgtcaatcagggaatgagcaaacctaattacttcctggcacctcattaccccattaacccacgtgtgctgaaattcggactttcatggaacttctatgattaacaaaacctctatggcttatgaaaacgcgcccgaaattgagactattcagatatctgttgccggtagtcattgtattggcacttatcttctctgtccgctattgcggtaaacaagaaaaacctctggggcatccgcgtgattacgcagccatcgccaaagaaggcatcctgcatgtagccaccgaatataattcaatcagtttttatgtagacagtgacactgtctccggattccattatgaactgatagaagcgttcgcacgtgacaaggggctgaaaactgaaatcactcctgtcatgagcttcgacgaacggctgagaggattaagcgacggacgctacgatgtcatagcatacggaatactggcaaccagcgaactgaaagattctctgcttctcacctcccccatcatactcaacaagcaggtgctggtgcaacgaaaagcgaacggggagaatgattcactttatatccgaaaccaattggaccttgcccaaaagacacttcatgtggtaaaaggctcgccttctattctacgtattcagaatctgggaaatgaaatcggagatactatttatataaaggaaatagagaaatacggttcagagcagttgatttcgttagttgctcatggagatatcgattatgccgtctgtgatgaaagcattgcccgtgcagtggtagattcattgcctcaggtagatatcaataccgcaatcagttttactcaattctactcatgggcagtcagcaagcaatcacccgcattgctcgatagtttgaatacatggctggataaattccaaaaagaaaaagagtatcaaaagatttaccggaaatactatggtgataaatagataaaaaataatacgccgaagacttgactttcgcatttgaatgtcgtatctttgtcaacgtaatcataaagtagtttcagttaaactacacgtaaaggagggaatcacagttccctcctttctttttgttacaatgaatgaaaatcagcctttttcccagctttttgctcattttacccccgagcttagtccgttttacctcgtttgttaccatacttaacatagtatcttatgactaattagatgctttgttatgattaatcagatgctttgttatccataaaccgatgctttgttctcccaaaacagaagctctgtttccggacagctcccaagagttaacaatcaataaagttgctcttgacaaaaatttgctctacttttgaaaaaaattcccttttcgatgtcacgtttttaatccgccaccgtcttatcagtgtaaatggaactgaaacaatttaaaataaccgttgtaccccttcgagacaagctgctgaactacgcccgaaggatgacagatgatccttcggatgcggaagatgccgtacaggaagtcatgctgaagctgtggaatctgcgccagaagctagacgagtacagaagtatcgaagccgtagccatgaccatgacgcatcatctctgcatggatatgtggcgtgccaaacgaccggacactctatcactcgaccgtgtacaggctcccaccccttcggctactccggagcgactgctggaagagaaagatgagttcagattgatgcgggaaattatcgactccctgcctacgctgcaacgaacgattattcgcatgaaagacatcgaagagtacgagacggaagagattgccgaaatcaccggctgcaacgcagaagccatccgcagtaatctgtcgagggcccgcaagaaagtaagggaagtctatttgcaaacgatacaagaacgaaaaaggaggaacaaagcatgaaagatatagaaaccttgctaaacaaatatttcgaaggagaaaccacttgcgaagaagaacgcagactacgacgtttctttgccgaagggctcgtaccggaacatctggaggtatatcgcccgatgttcgctttcttcgaagcggaacagaaggaacttgcggaaatctccggtaaaggtaatgccgccgagatgccggaactcgccccattcgagaaaaagacaaaaacggtcagacagtatctgacttacagtctcagtgctgccgctgccgccatcctgctactggtgggcatctccggtatctaccgtcatctatcccctgcaccggccaactatgtgatcattgacggtaaggaatatacggacgttcatttaatccgtgaacaggcgatggtcgcctttcgtgacgtcagcctcagcgaggaggaagtattcgctactttatttgatgaataatataaaaacagcatataattatgatgaataaaatcattcgtaccacactaatcaccctgttacttacattcgccgcccatgcggccgcccaacagggactacagattgccaccgtcttccagaagtacggaaagcaaaaaggggtaactatggtagagctatccaatgaaatgctggaaacttaccagatgactctttataaaagtcttgttttcaaggatgccagcgatgcactacctacgattctccgttgcctggaagccgacaagaagaaagcaaagaaggtgaaagaagtggtttccaacgggcaaatcaagtccggctattaccaacttccccagcttaaggaagatgtgaaccgctttatcctcttcaaaaccggaaagaaagattcggctacccttatctatattgaaggagaactggatgccgacgacctgatcaccatgttattcatgaagaaagaataaaaaaacagataaagaaatacgaatatgaaaaaactattattactatggctcatgatagctccaatgagcggcatggcacaaaatgaaagtacaccgcaggatacaacactttacgtcaacggacggaagatcgtaatcaaggaacaaggcgacaagattaaagtgaaactctacgaaagcgcatccggcggagatacgataacaaacgcgcaaatcttcgaaggagtctacctgaacgggcagagtacggaaagccgtaccgtgctgagcgctctccccttctcgaagaaaaacaacaagagaaacaggttcgagccacatgccggcggattctacatcggctacacccgactgtccaatgacttcctctcattcaatccgtcgaacggtgccgacctcaacaccagtcattcatgggagataggcggcaatctgtttaccggttcgcacgcctttgcacctacctataactgggggatcaccatcggactaggatggggataccgcagtatgcgcctggacggcaattatgcttttcgtgaaatagacggagtgactgaaatttactccggcatggaggcagaagagcctacagagtacagcaaaagccgtctgcgctatttctacttccgcattccgctctctatcgaatggcaaacacggctcaacggcaaaggtcctttgttttttgctgtaggtcccgaagccgaaatacgtcacggattcagatccaaagccaaagtcaatggatcgaagaagacgattgacaagggactgaacgggcgcccgctaggtatcaacttacttgcacaagccggttatgcagatttaggagtgtatatgcgttactccacctacggcctctttgagaagaacaaaggtcccgaactttatccgttctctttcggtgtatgctggtactggtaaagtaaatactcagacccttgcctatttctgacagttaacaatcaataaagttgttcttaataaaaaatagctttatctttgggagttgttaaaacaagcacaataggtatattatgagtgaaaagatgattaaatggggcttcatcggctgcggagaagtaaccaaaaccaaaagtggccccgcctttcaaaaggtagaacattctgaagtagtagctgtaatgagccgcgacggcgccaaagcaaaggcttatgcaaaagaaagagggatcagaaaatggtatgatgacgctcaggaactgatagacgatccggaagtaaatgccatttatatcgccactcctccttcttcacacgctacatacgccattatggctatgaaagcaggcaagcctgcctatattgaaaaaccaatggctgtcacttatgaggagtgtacacgtatcaaccgtatttctaaggaaacgggtgttccctgtttcgtcgcatattaccgccgctatctcccctactttcagaaagtgaaagaaatggtagagaacgggtctatcggtaatgtcatcaacgtacaagtccgctttgcacagccgccacgtgatttggattacaaccgtgaaaatcttccttggcgtgtacaggctgatattgccggtggcggttacttctatgaccttgccccgcatcagatcgacttgctgcaagatatgttcggctgcatcctcgaagccagcggatataagagcaatcgtggagggctttatcctgccgaagatacgctgagcgcctgcttccagttcgacaacggattggtcggcagtggttcatggtgctttgttgcccatgattccgcccgtgaagaccgcatcgaaattatcggagataaaggtatgatctgcttctctgtctttacgtacgagccgattggtctgcacaccgaacgcggccgggaggaaatctgtatcggtaaccctgagcatgttcaacaacctcttattcaggcagtagtagatcatctgctcggtaagtcagtctgctcatgcgacggagaaagtgctaccttgactaactgggtaatggacaaaatattagggaagctctaagataaagctccctcgtttgtttcttaaaataatttaatcactatattctatcgttagttttctttatatttgcgaaaggtagcaataaaagcaaaactaacgatatttattttttataactatgaccaaagaagaactaatgaggaaagcaatagagctttcgaaggaaaatgttgctaatggtggaggcccgttcggaactgtcattgcaacaaaagaaggagaaattatagctacaggagtcaacagagtaacctcttcatgtgatcccactgctcatgccgaagttagcgccatacgtgccgcagccgcgaaactgggaacattcaacctcagcggatacgaaatctatacttcatgcgaaccttgcccgatgtgtctgggtgccatctattgggcacgactggacaaaatgtattatgggaacaacaaaacagatgccaaaaacatcggtttcgacgattcctttatttatgatgagctggctctaaaacctgccgacagaaaacttccctcggaagtattattgcacaacgaagccattacagccttcgaagcctggatgtccaaagaagacaaagtagaatattagcatctaatctcacttaaactcactaatacttagtaaaatgaaaagaaaaaactttttgattcttctagccgcaggatgtttgttcagttgtcagcaacaggatgaactgcaagaaacaagtaaagaagcaaccaacttctctatctctatcgacgacgctctctctgacccgctcacccgtaccagcaatgatctgttccctgccagaaatagcatcactacaggagaagttatctccatggctgcctccggtcaggactatactccgtttattgttggcaaagacagccgcgcatggaacgaaacaggaactgccacaggcacagtaaccttctacgcccactatcctgcattgacagacgaagccgctaccagatcaggcggtaacaaacgctatttaaaaggaggtcaggagcacttgttcggaacagcggaagcagctccgggcagccagaatgtatcgctgaaattcaaacgaatgaccgtgccggttattatacttgatgagaacgatcgtccgtatgaaggcgaagctaaagttgagctcagcctgaaaaacgaaggtacgcaggatttattgaacggtaccatagaaatcaacgaaaatgcgctgtcagagaatatcgaagtaaagaaagtatccgaaggcgttactaccaatgttctcccgcaaaagatcaatgctggagaggaaataggaacgatcactgtcggaggagtcactcagaagatcagtgcagtggaagatcttgatttaaaagccggaagcacactttctgtcagattatcaaaaaaatccggaggcggtattattgatggtaatgttccattgtacagataagaagattgcacttaaagacaatcttgcagattatataaatataaagaacgggattcgtatgaatcccgttcttttatttagacctaaaaactatataataagccggtcagtccccaagagccgaccgacttatttataacactttattacttatcccaccatacgcgtgatgtcatcttatcgcctccgctaagtctcttaacggcatcattgtaattaacaggattagctgttatttcacttgtcggataaatgaaacgacgaggaatctctccatttgtcacattgttaggatagctggctgcatttcgagccggggttaattttggatatccagtacgacgccaatttgcaaaagcttcatactcattacagaacgtatggatataatattccgtattaatctgttccagcgctttttccgtatcagcatccaatggattagcattcagataggcagttatcgcatcatctgtaatcgtagctgaggctttttcataataggagaattgtttcatggcagcagttactccatctctataaaatttttctgcatctcctgtatagagtccacgtttcactgcatcagccaataataacaagttaccggcatgagtgacaagcatagagggtgaatccgggcgtgcataaactgtacggttaggaacagaatatgcttttctccaattttctcccggatatcccggagctttactcaagtcccagtctcctcctgacacatcataaccaactggcatacctttctgcttagcagccgtgttgtcacctaaatcaaaatcggcatctccccatcccggtttagggtctctggtacaaactgtagcaatcaaaggaaggcgaggatcgtcctgaaggatgtttataaatgtttcgctgatatagaacgcctgagtatccagactggaaaatacttttccgtaaggttcggcagaatcatcgcttggtgaaccattggtatgtctgacgatcgcattatcatcgttgcttacgaacaagccattcgaaaccgctttagctacccatgttttcgctttatcaggagctactttggtcaggcgcatggctacccggagcatcagtgagtttgcaaatttcttccatttcgcagcatcaccgttatagataacgtcggcagcccctatcgtattaccggcagaagtgcttaatgcagcttgtgcttcatcgagttctttcaacaggtcattatagattgcttcttgtgtatcatatttaggatacggaatcggattggtagaatacccctgccctgcttcagaataaggaacgtctccataaaggtcagtcatattctggaacatatatgctttcaaaatgcggcacatctgatattcattcgcataagcgggatttccttcccaattattcatcacatctataatattgcgaatagctgcacgcccaccggaatagaatcctccccaataagcaccactatactgatcgttccatgtatagaaaactccatacgcccaatctacactagccgtatgctgcatcatgttggctgtgtagatacagccattacgccacacgtcccagtcggagccacatatctgtgcttcaacctgagtaaattccattttataatccaccactccgggattcaggttcatagggtcgttattcacatccccaaagtcattacagctcgtcgctaatcccatcagaccgaaagccgtcaatatatataaagtaaactttttcattgttacagtatttaagatgttagaacttaacatttacattgaatcccacatttctcgtggcaggatatccgttcaattccagaccttgagcattaccgttattataagcagattccggatcaatattatccgtatgcttcaatatagtccaaaggttacgaccgactaaagaaagggttaccccctttataagtgtctgcttattcaaccatgcctgcggcaaagtatatccgactgacagttcgcgcagttttataaaactcgcattataaacaaactcttcagcaatattctgactggtgatagcctgccagtagtcttgcgcagaaacggctacggtattcttcacatagccacccttgccatcggacattacaccattgcccaccattgttcctttaccgtcagcaccacgcccctgcaaagtattcttgtgcagaccgttgctgtaaagagacagattggttccggagaacatcttagctcctgccttgaagtcaatcaggaaagaaagagttatgtttttgtaagtaaactcattgcgccatccgccggttaccttataaacgccgtttcctaatacctgaacctcgtctgagtgtacaggaagaccgttttcaaaaataacttgtccgtccgaagtacgtttgtattcataacctactaattcaccataaggatgtcccaagatattctgaacagaaacactacctacacgtgaattggctccgtcaagagtaagtctctttatcttttctcccgttccgtctattcccaggtatttcacatcactgctgttataagcgatattgaatgtagaattccagttaaagtcctttgtatgaacaggaacggcattcaccattacttccacaccattatttctgatttctccgacattctggatagctgattcaaaaccggaagcaccactggtggttacctgcacgatatcatctttggttgtttttacataatatgcagcatccaatgacaggcgattatccaagaaagaaaggttcaaaccaatttcccattcggaaatctgaaccggtttcagtcctttgttaggtacggtcgagttattgatcgttactacaggctgtccgttcgattggtaattatctactttataggtaagaagattctgatatgctttggttccgttagatgcagctgcataagatgcacgcacctttccgaaagtaaaccagtcgggagtcttgaatgtatcactaaatacccatgacataccgatagaaggatagaaataatgattattatctgggtccagtgtagagaaccagtcattacgtccggttaagtttaagaatacctgattcttataaccaaggtctgcagtaccatagattgaatttacccggtattctgtatattctttcttatacacatgcttcgcagtattgctgcttgaataaaaatcgggcacaaagaatgaagaggccttatcatccagaccgtatttctttgtaatatttctctgacggtttccaccgaaagtagcaccgacactccagtctccgaatgtcttattgaatccgatcaaatagttcaggttcatttcagagaagttctgagtgtattcctttatataaccgcgtggatcttccggagaagcggaaccgattggcttcacttcagaatattccagattataaccgtcacgtgtcacagccccctgaatgtataaccagtcaaagatatcatacttcaaagtcataccaccagtcagacgattacggttggtttcattggtaaccctgtactgcaaccaatacggattattgaaataaccgttcgtaccgcctagcaactctttgccgtcagcaccggtaccccagtcacaatccggattttcacgttccatccaacgtatatcaaatgaattggcatgataaagaagtgcggcattcgtgttactgttaccatcggacaagttagaacgacctttattcttgtcgaatacgtagttggcattcaccattaaatgaacttttgaagaaatgtcataagtcgtattcatattgataccttgctggctgatgctggaattgggaagtatcccctttaccgccatattggaaacaccaaaacgataggatatcttatcggaagcaccgcttactgccaaggttgtcgtattgttaattcccgtacgatagaagttcttccagttatctaccggagaataagcgtattcgttacccaagaagtttactgctttttttccatccattacttcaccccagctggatgtttccgttgcttttgccacatctgcagaaagcggacggttcccctgagttccttgcccgtagacattctggaaatctcggtaatcataaatcacatcaaaagccaggttattgttgaattcaacggagaccggttttcctttctgaccggatttagtagtaatcaagatagcaccgttaccaccacgatatccataaagagcggatgcagcagcacccttcaacacctgaatatctgcaatatcatccggattgatacttgacaaaccatcgcccatatctttacctccccattgacctgcactaccgatattagtattatcaaacggaacaccgtcgataacataaagcggctggttgtttcccgtcaaagaagcattaccacgaattacgacacggctactaccacccgggccagttgcatttccggaaacggaaacaccggcaatcttgccggaaagtgcgttaccaatgttcgttgtacgagcttcagtgaaatcttttcctcctactgtcgttgtagaatagccgagggaccttttctgacgcttaatacccaaagctgtcactacaacttcatcgagtgtctgcgtatcttcctgcaaagtaatgtctaaaggtttacccgtgaacttcacttcctgaggggtataacctacataagagatttgaattgttgctccgtcaggaacattggaaagaacaaaattaccgtccaagtcggtaattacaccatttgtagtacctttgactacaactgaagctccaataaccgcttcacctgccttgtcttttactacacctttacacgtaccgttttgctgtgtgacactcacacttgttgctccattctcagaggctgcataggaaattgctgccggcatggcacacaagagcaacagcacacttactgatttgagtggtttaaacataatactgctcttttaaggttaataaaaattgtctgtgtgtagagaggacgtcaatatttcatagtttggttctgactacgattacaaaaatatgaatttattttaaataacaagaaaataagtagttttttttctttaaacaaaaagaataattatatcggctaacaaaatcacaatatccaaaacagaatgaaccttcttttgcattaaatgaaaagataataaagaaatccctggaaccgctgtagacactcagcattccagggactctaacacacaaaagttattattgaaattgaaaacagtttctaattaaaaacgcataccaactgtaagaagcactttatgattattattggttatctccgtagctcttaaatccaaattatcaaatgcataaaaactttctttataagtattatattgatatgccatatctgcataaaaagttgatccacgatatccaaatcctaatgtatagttattagttgcacccaaattggaatattctgtgtcagtacgaatggagttactttgaatccacttatatgcttccggtttcatcgatgctgtgatatgattatatcctaaacgaaaagcaaattccggagccaacttaaactcgactcccgcacgaaatgtatgaacccctttcatcattgactttatatcatcagtttgctccaaagtaatcccatccacatcctttaattttgcagaagaatagttactatattcatactctactccgaaagctgcaacagaaccaaaagtatatcctgtgctcagattaaatttccatggagtaaccaaacgatactcatattcaccatccatcggatttccattacggttgacaatttccgcagagcctggttttaaatcttctacagctaaatcataagcaatatatgcatgattatgttctgttatagaatagaaagtcggcgtatgtatagcacctccgatacgaaaagaagaagattcaataggacgccaaataaatccaactttaaaatcaacaccaccaccacttgtccaatagtcatttcctaaatcataaccaccataatcattgccatccgcccctatgaaatcttctttataaaggcttgtacgtttataatctaaactatatgcaccaatcgtagcacctagatagaagcgatcatacaagttgaatgaaacattaaaatcgtatgaatgtaatcctcctctctcacgggcagtataagcttgtctcactttatcaccaggatgcaaataaggatcataaccatcaaatacatcttccttaccttcttctttaatataaccgggacgcaccaattgcgaatcatatcctagtataccaagccatgggatatctgggttttcataagcccctgctgcttttatactttctaccgttacaggcgaaaactcaccatcatagaaattcagcaaatctgccataaaagtagtttgagactgcccaaaaacaccattcattaccatattcttatcaaatgattttgtacggtgataattgaatccaaagttaacataacgtaaaggagttgaatttccaatcttattggtaaatataaagcctgcattatcaaatgacccatgaaatttatcaatactagatccacccgcatctttagatccgacattaacaaagccaaaagataccatcacatcattacttcgataaataccgatgccagcaggattagttcccattgttgagatatcaccacctagagctcccatcgccccacccatgccaacaaagcgcgccgtcccgtttagatcgctccccattaaacggtttgcatcataaatggtagtttgagcattcaacatgccgcctattccaagcaagaatgtaccgaatacgattattctatatatatttttcataactatatctttttaataatatattatcttctactactacttctgctactaccaccgcctgatgaacgcgatgatgaagatgaaccaccagaataacttcctccactgctacgagaagaactgctgctcggagtatatgaagaagaactactactgcggaaaggagtatacgtagaagaagagcgactagaacttccactatcatagctacgtgatggagaagttgaacttccacgggaataagttgaactactacgcgtggtagaacctgtacgggaatatgtcgacctactacgattaggagcagagtttgtattcgttctagaactactgttagaacccgtagtagaagtacgagtataactacgcgtgctgctaggacgagtgtatgtacctcctcgtgtaccttctgtacgtgaagattgcactccttgtgaacgtgatgttgagcgcgaacttgaacgaatgtaagatgccccttctccattacgagttcctactacccgaccagaagttgcccttgtatgtgtaccttgatatgaggaacgagaacctgtaccacgtgatgaattgaaggaaccagaactactataacgtgaacgattattagcattcagcacagtacgcccgtagggtcttcctccaccgccccagccccagctaggaccaccaccccagtggtgatgatgtccccaataaccgccgccatagaagccaccccagtagccaccataccagccgccccatgaacccgggtaatatccccagccatagtaaggacgattccagccccagccatagttccatccccaaccgtaggagttgtaacgccaatcccaccaaagcggattactaaatgtcgggaaagcataagcgtacatgccatcggtataaacattccagttccatgaattaggtccgtaaactacgtcccaatagagtgggctgctaatgctgatagcaaaacgtggattacggaaacggataatacgttcggcatattcatagtcctcttgcgaaccatcaaattcaccggttacccattctccttccaagtctggctgagctttctcttttatatataaggtatcgttttccattacgaattcattctcacgagcgtcataacggcggttatattcatccacatcccgtgtttttcccttgcggtcctgaactacaacggtagtgcccggtgatgtatagatgttggtcgtgacttgtcttttcggttccttcttttccggagtcgtttctttcttctcctttttgtctttagaaggtacgaaataaaggtcgtcatcaacgctttgtgccatcaagcctatagggaggcataaagcaattagcaagaaataaacaatctttttcatatcatctcggtttatgtaattacttaaacttattcacattacaaagataaggaagagattcgccactctagggagattttccccaaaggataatagggaaatccctatttctgactatctttgcaaaagattcaccaaattaaaaacaactatgaagtattttgagttcacattccatacaagtccatgcacagaaacagtaaatgacgtactggctgccgtattaggcgaggccggatttgaaagttttgtcgaaagcgaaggcggactgactgcatacatacaacaggcattatgcgatgaaaatacaataaaagatgcaatagccgacttcccactgcctgatacggaaatctcctatacgtacgttgaagcggaagacaaagactggaacgaagaatgggaaaagaatttctttcagccgattgtgatcgacaaccgatgtgttatccatagtaccttccataaagatgtaccccaggcaacttatgatatcgttatcaatccgcaaatggctttcggcacgggacatcatgaaacgacaagcctcattatcggagagttactggacaatgagttgaaagataaatcacttctggatatgggctgtggaacttcgatcttagcaatcctcgcccgcatgcggggagcacgcccatgtaccgctatcgacatcgacgaatggtgtgtacgaaactccattgagaacattgaattaaatcacgtagacgacatcgccgtttcacaaggagatgcctcatcgcttattggcaaaggcccctttgatatcatcatcgctaatataaaccggaatatcttattgaacgacatgaagcaatacattgcttgcatgcacccgggatcggaactttatatgagtggattttatgtggacgacattcctttcatccgccgggaagcagaaaagaatggactgaccttcgtacatcataaggagaaaaaccgctgggcagcagtgaagttcacatattaagcattaatcttccttatctgtttcaagaagacacagaccacgtatctttaaaagacagcatatatttgtagtagagataagatgtacgagatgctcatctcgtgctgtacggcatgctcatcttgttataccccagatgcacatccggtagcgtacgagatgagcatctggtacataccatcctttaatgaaaagaatggtatggtataatattccttctgttatgttaccgggaaacagatataaagtattaaggttttgaatcaaactcattctttacctgttcgcaccattccctgattctcttttccgcttgctcggattgattatccaaatcgacgaccaaaccgcaccaccgatcaccacgcaacgctctggaacgttcgaaagtgtatccttcggaagaagtaaaaccgaccagcgtagccccgtctccttcaaatacctcggcaagcaacccgattccgtcagcaaagttttcgggataacgtatctgatctcctaacccgaagacagctacttttttccctttcaaatccaatgtacgaagttccggcaataactcatcccaataggtaggaagttctccgtcaaaccaggtcgaagcacctactattaaacaatcgtaagctgcaaaatcattttgccatgcctgctcaataggcaccacttctatcctatcttttccaaattctttctgaattttctctgccacccaagtagtcttatcagctttggtggcataaaacaaaccaatcttcttcatatactatacctccattttattccattaatattccaatagctttttagctgcctcatagatcttcgcctcatccggcaatatctctttttccagaatcggattgaaaccgacaggagtaaatgtagatccgacacgctgcaccggaccatccagataacggaacatatccgttccgatcatagccgcaagttccgcaccgaaaccggagaacaccttgtcttcgtgaacaaccaatgctttgctagtctttttcaccgattcgaaaatcgcctccttatctaatggtatcaatgaacgaatatcgatcacttcgactttccagccactttctttttccagttgctctgctacgtgcaggcagaaatgggtagtattaccataagtaataatgctcaaatccgttccttcacgacgaatacgtgcctttccgaaaggaacctcaaaatcttccggaacaacagctgctgcttctaccgaattatatagagctttcggttccaaaaacaaggtaaatccctttgaacgcatactggttcgtaacaatccggctgcatcatctgcaaaagaaggacagacaatacgtgcacccggcaacgttgtcagagccccctctatattttgagaatgatataatccaccaccgatatatcctccggaagcaagccgtaaagtgatattcggagcaaacttaccgttactgcgccaatattcatgagtacactccacatactgttctacggcaggccagaagtagtctgcaaactcagctccttctatcactacatggattttagggtcaaatcggctcataccattggctgtacctacaatataatcttcggcaatcggtgcgctgaatacacgcgcctcgccaaattcctgctgcatgcctttggtcacattaaagaccccgcctttttctctgttagccacatcttgtccccagataaaggtatccggattatggcggaattccgctttcaatgtttcattaattgcattgaccagaaaagtcttctctccttcttcctgatgagtaccttctttgtatttttgcggctgataaggttcgggcatcacaaaatcgtaaatacttttagggtcaggttcaggggcagccagcgccttgcggttggcagcagatagttccttctttgattcagcttcaatttgcagcagttcctcttccgtcaagcgcttatagcgcaataacatccggcggaacttcattagcggatcggcttctttcacatattccagttcgttttcatcccgataaagtgtatgtttatccgaattggaatgagagccgatacgaacgcagttagcctgtacaatcacaggattacgggtactgatcgcatattcgcgtgcctcagtcatggcattcatggaatcgaacacatcttttccattgcagtagataatcttcagattcttgaaaccggagaagttctcggctactttacgattggcagtctgctcggatttaggaacagagatgccatatccgttatcctgtataacgaaaatcactggaagacgttccagactagctccattgatagcctcgtaaacaaagccttcggaagtagcagattctccgtgcgaagtgattgctactcctttatgcccataatataccattgctcttgctacacccgccgcatgcaggtcatgcgttccggtagcagaagatatattttcaatatgccattccggtttggcgaagtgattcgacatatgacgtccgccgctaccgggatcggttgctttcgaaatgccgttcaatataatctcttccgcagtcattcctgcagaaagcacggtcagcatatctctgtaataagggaacaggaaatcttctcccaatgtgaaaacctgaccgacagccagttggataccatcatgccccgcataaggagcatggtatgaccaacccaaggattgcagctggtaagacggcgccttctcgtccaaagcgcgccccaatgtcatcagatggtaccactttttcagtgtttcaacatccgtagtctttatatcatatttctttttcatagttaatgaagttcttaatgaatgaaacaatctgttatcagcccttccagttttccaggtaatcggcaatgaagtgcaggaagttgcctcccagcataccgtcaactacacgatggtcataagacagagacagatacatcttatgacggatagcaatcgtatcaccttccggtgtctctattacggcaggcttcttctcaatatatcccactcccaaaatggcaacctggggctgattgattaccggcgtaccgaacaaactcttgaatgtaccgaaattagtaatggtaaacgtacctccgtcaatatcatccggcatcaatttgttatcacgagccttcaatgccagcgagtctatagctacagccaatccgttcaagttcagatgatcggcatcgtgtaccacaggaactatcagattgccatcattcaaagaaacagcaataccgatattgatatgtttcttaaaaagaatattatatccgtcaacagatacattgacctgaggatatgctgccaatgcttttgcaacagcttctgttatgacaggcatataggtcagtttcactccctcacgacggaagaaagcgtctttattcttttcacgccagcgtaccagtctggttacgtctacctctactacattggttacgtgtggtgaaaccttcttggacatcaccatatgatccgcaataatccggcggacacgatccatttctttcacttctactcccggaatattggcagctgcaggtgcttgtttagatggagcagacggtgcagcaacaggagtttgcacggaagccgccacaggagaagttgtcatagagccagcccctccagtcgaagaaggcatagaagccgtaagtgcatcaccggtaggtatcgccgccttcgagacttcggaaattccccttttcttcttctcaatataatcctttatatctttcttgctcaaccggccttcgtatcctgtgccttgtatcgaatcaagttcttctttcggaatattcgcacttcgtgccaattgaatcaccacaggagaataccagcgttcttcagcctttgctacctgagaagatactttttctgcatcagaagaagcattctccttactttctggagtttcttttccacttgcagtttcttcatcggatgcctcttcacctcccatatctacaacagcaaccactgtacccacagcgactgtatctccttccttaaacaggatttctactatcttaccggctaccggtgaaggtatttccgcactgactttcgccgtatttacctcgaagagaacatcgtcttcctgaatgacatcccccactttcacagaccaagagacaatcgtcccttcggttatactctcgcccaacttaggcatttttatttcgaatcttgacatagacagtaaatttattattcaaccttgaactattagaacaacccgctgaaaaagaaagttttaagttaaagtatttttaaccggactcaacgactgaatatccattcttcgcaaatatatttctcagtccgaagtctatggattgcttccaattctttctcactgaaagtatcagcacatcccttctgactaaaatattcgaaaagtatcgctttgaaatgatcaaccgtttccataggtaagtaacgactgatatttgtgacttcactacggacagacggaacagcatacacagatgatgccacacccgtctcaatgttcctctccggattcagtaccttgtttaaagcggtaagattcgtatcatacaacaaagtacaatgataaagcaccctgttcttgtgtacgcactgggcactccccgatattttcagaccatcaagatagatacccagccgttcatctccttttgccggcaatcctatctgttttaagaaatccagtatccgatgaagataaagactgaaatcaggcaagcgggacactgtttcgataaaagttaaattgacattacccaaatcatgatatacagctcccccacccgaaaaccgacgggctatttgaatctgttgttcttccgcccattcccggttcacttccaactgtacagattggtgttttcccatcactacagaaggagtgtcctgccaaagcatgaaaacagaatctgtttcctgcttcagcaaatactcttctgccgccagatgaaaataaatatctgtaaaagtgttatgaaagcacctcatgataaatctctccaaccgtaggatggggaaatacattcttctgaaattcctcaaccgtatagcccttctgaatggctattccggcaatcacaatcaattccgacgctggatttccaagcatatgacaaccgataatatgatcagcttcatcaagtatcagcttacatattccatttgcctgttcgttctccgcaacaaaacgtccggaataagccatcggcaacttcgcaacacgataagaaatgccctgtttggtcagctcttcttctgtcttacctacgccggccacttcaggattggtgtaaacgactcccggcacactgttataattcatccggtcttccactcctaaaatatggttgatagccacttccgcctcccgaatcgccgtatgcgccaataaagaatagcctgtaatatcaccgcacgcatatactccgggatgagaagtctgaagatattcgtctactttaaccccattccgatgaagttcaatattcagcttatccaatccgacattggaaatattggctttacgccccacactgagcaatatcttttccgtttcgatggtagaagtctttccatctttttctatgacgactccgccaggtttcacttctattactttagtattcaagtagaaagtgactccacgttttgcatattccgtacgaagcataccactggtttccttatccatgactcccagtatctccgacatcatctcgacaacatgcactttcactcccatactgttgaagaaagaagcaaactccattcctatgactccaccacctataacaaccaacgtttcaggaagttctttgatctccaaagcctcttttgacgtccagtaactaacttccgacagtcccggtatcggaggaataaccgtgtctgaaccggtacataccagcagatatttcacttcatatctttctccctcacagatgatacggatcagcccgttttcttctccttctataaaggcttctttttccacgatcgtcactccgtaagagttcacggtcatcttcaccccaccagtcagcattttcaccgttttctctttacggctcattattttaattaaatcaaacgaaggagattcggcagaaatgccatatttggaagcactcttgatgctatccagaattttagcagaatataacaacgttttagtaggaatacatccttcattcagacataccccacctattgcctttttttcaaacagaacggctctcagtccgtttgcccctgccctttcggcagctgtgtaaccagcagggccaccaccaataatagctatatcaaagttcataatcgtatctttttagtaataatacgattataacaaataagagaagagattagttgtatgacagaccaatcatcctacttgatcgtcagctttttgagttcttctaatgtaccgttgaatacattgaggtctacatcttctttaataccgggtacatttccgacatcagtatgttgccagaaatcccatttgccctgatatttcaccgaatcgacataatagtgggcgatccaataaggataagcattgaaaattgaatcgtccagataacgggtcttgaacttataagaagtataaagaatgggcttcaccccataatgggattctatacggtccaaccagcgcttaatgccttgctgcaattcttttttctcttttcgtccggtcacttccacatcgagaaccggaggcaggtcaccggaatccagtttgaccgtacgtataaaaaagtccgcctgtttcaaagcatccgtaccgggaatatagaaatgataagcgccacggataaagccatgattacgcgcattagcaaaattggtttgaaaggtagtatcgttatgatctcccccttccgtcgctttcataaaaacgaagtgcaaaggagttgccgtctgtttattctgtaaaagtctcccccagtctatttttccttgataatgggaaatatcaatcccatgaatatcatatccggaaggaatacaaactccatattcctttaaaccattacaaggtttccaccgataagcataaggacgtataaagaaataatagaaaaccatagagaaacaaccgacaattaccacagccaatatatttcgaagccaaccgggcatcgaataatgctgcttcaccggtgcctttttcggagcacgggaaggcctggaagaagaaaccgtcctctttttgggggtagtggaagcagttcttttcttttggacagcagaaatcggattattacgtgacgacatttactttgagtgatgaaagtgatatagataggcacggattacacggaatacacggttttaagaaatagtataactaaaaccgcgtcaatccgcgtaatccgtgcctgaaagagctcttcattgcaactgcttcttactacagtccggtgaagttttcttatttagcttgttccaattgcaaagtcttagttgcctggtcgcaaacttctgtaggaccaaagtactgaatcggacccggatatacataatccgtttcaacagcccaacggtcacgctgtgcagcgaatgctttgaaaggagcaccatccaatttcactaatgctttctggatcaccggtttcatttcaccgtggcggcgttccatattcatcatcatggtgataggcacaccacctgcaatccattcggcagcaggagcagttgtgttgcgtacagaagacatataaccggtcttaccgtcagcaatcagcatagaagctgtgtatcccaaagaatagcagtagtcagcatcaaagtttgacggagcagcgcaacgtccttcgtaaccgaagaagtggtgctgtgcagcaaacttacccacatatttgccatcttctttccaagcagccaatttggtagctaccatttcagacaacagtttttctgtttcgatcagtgatacctgaacgtttccgtgcgggtcacgatccagtgtcagctggcgagctacaccttccggcagacttgcatagatagcagagttttccggagacagcttacggatgatgtaatcacgttgatgagacttcttgatctgagagaactcttctgcatttgcagccaggaagtcgttcaattcagcgatcagacgcttcatagccggaataaattccaccaatccttccggaatcaatactgtaccgaagttatttccctgtgcagcacggtcagctaccactttagcgatagatgttactacatcatccagagacatatctttttcttccacttcttcagaaacgatacatacgttaggctgtacctgcaaagcacattccagtgcgatgtgagaagccgaacgacccatcaatttgataaagtgccagtatttacgggctgagttacagtcacgctggatgttaccgattacttctgcataagtcttacaagctgtatcgaaaccgaaagaagtttcaatcatatcgttcttcaagtcaccgtcaatcgtcttcgggcaaccgatcacctgtacaccgtacttcttggcagcatagtattcagccaacacacaagcgtttgtattagagtcatcaccaccgatgataaccagtgctttgatgcccaattccttgatgatctcaaatcccttttcaaactgagcttcagtttccagcttcgtacgtcccgaaccgatgatatcgaaaccacctgtgttacggtattcgtcaatgatgtcagcagtcagttccatatagttgtggtctaccagaccgccaggacccaagataaagccgtacagcttactttcaggattcagctttttgataccgtcgaacaaaccagagattacattgtgtccgcccggagcttgtccgccggaaaggattacacctacgttcatagcaggaagttgaacagcttcacccgcttcgaatgtaatcaacggcattccgtacgtgttagggaataatgctttgatagcttcctgatcggctacagattgagtagcagcacctgctacagctttaacggctcctgttgccaatgctttcggaagtttgggctgataagcagcccttgcgatttgcaatgcacttttagtcattttctttatttttatttaaaggtgttagtaagtttcttgtcaaacttgaaaagcgttgcaaatttcgcatttttcctcgaattatgaaagagaagccctcattttatttcgctgcatagttacagaggctattgcttccagccaccgccaagtgctttatacagttgtactacggtgatcagttcatcacgaatagcgttactcagaccaatttgtgcgtcaaaataaccacgctgggcatcgagaacatccagataattgatcactccattgatatattgcaactgcgccaaatccatataactcttagccgaacgttccagattggcacgaagcgcgtacacctcttttatcttattaaagttgacaatcgcattacgtgtctccttgaaagccgtcaggactgttttctcataactatgtatttctgcttcataggccgcttttttgcctttcaacgcagcacggttttttccccagccaaaaataggagtcaataaagcaccttccataacggcataaggcgattttagaagttctgacaaagacgtgctttcactaccgaaaccacccgtcagtgccagacgaggaaacatattcgtataagccacacctacttttgcattggcagcgatcagcttctgctctgcctgacgtatatcgggacggcgttcaagcaaagtggaaggcatccctatcggaagagtttccgggaaattaaactcctgaagcaaacgggaacgggctatgcgattcgggtattctccggccagaaaagcaatatcattctctttcagcgatattttgcgttccagatcaggaaccagagtagctgtacgtgccaactctacctgcgcctgacgataagaagtctccgaagtaagtcctccttcaaaacggatacgtgccagacgaaccccttcttcacgagcttttaaagtctgcttgacgatatccagttccgtatccaaggcaaccagctcataatatgcctgtgccacttccgccacaatcgtcatctgaagcgcacgttgcgcttctactgactgcagatattcggcgatgctggcagaacgtgcccatcgcagatttccccaaagatcgagttcccatgaaactaggaactgcgcttcaaaagtatccgatttcttaaaagcatctcccccatgattttcaagttcacgctcggcagtcactttacctttaatatcgggaagcagcgcggcggtggatatccgtttctgagctgccatttccttgatgcgggcagccgctatcaacatatctttattatggtccaacgcacggtctataagactgcggagtgtggaatctgtgtagatttcctcccaatcctgatctccaaagctgaccgtatcctgatgttgagccagactatcgggtaaatgaagatcaggacggacgtagctcttgcctactttgcaggaagtcagtattcctgcaaaaagtagtatagcaatatatagtttattcagtttcattatttcttatgttttaagattttcgactttgttttatacaccatcacaaagaagaacggcacgagaatgataccaaatacgatagcgaatatcattccgaagaatacgcccgtaccaatcgcctgacggctcgccgaacccggaccactcgccagtaccatcggaagcattcccagtacaaatgcaagggaagtcatcagaataggacggaaacgtaatttcgctgcgtagattgccgactgaatcaagtcttcacctctatctacctgcactttggcaaactctacaatcaaaatggcattcttggcggcaagcccgacaagcattaccaatccgatctggaaataaacatcattctccagtccgcacacccaaactcccagataggctcccaatgctgctacaggcaaggatagcaatacagcaatcggcactgtccaactttcatattgtgcggcaaggaagaggaagacaaacaagaacaccagtgccatgaccatacccgtctgaccgcctgcctgtttctcctgataagaaagtccgctccactccagtccgatattatccggaagatggtcacgggcgatctgctccataatctccattgcctgaccggaactgtatccctgtgcagcagcaccccggataacggcagtagtaaacatattgaaacgcttgatacttcccggtcctgtcgtataagaagcattacccaaagaagtcagcggcaccatcgctccattggaagctttcacaaagaacaggttgatattgtctttatgttcccgataaggagcttccgcctgaatatataccttatatatacggttgaacatattaaagtcattcacatacaccgaacctgtatacgctttcatcgtagaaaacacatctgccaaaggtactcccagcattttcactttgtctctgtccacatcaaaataaagctggggaatctcagactgcaaggaagaagacaaaccggtaagctccttacgtttggaagcataatacatcaacgtatctgccgcatctaccaaattatcgaaagtagcctctccacgagcttccagctgcatttcaaaaccaccggagctgcccagtcccggtatgaccggaggagtagacaggtagactttacattcgggatattctctcaaatgtttttctaccgtatccataattttttcaatactggtgctctttctctcttcccaaggtttcagaataacggtcagctcggcacgcccctgattactccctacacgcgggctgcttccggtcacgttttgtacatattctatatatggattcttctccagataagcaatcgcgcgttccgtcactacacgtgttcgctccaaggtagctccttccggcagttcaagttcaatcttaaagtatccctggtcttctaccggcaagaaactagtcggaataatccggtgaatcaacagaatagcaatcaataccataccaaaagcactcaaaacccgacgaggatgtttgatagtacgggtgacggcagctacatacttattgcttccgatacccagccactcattgatctttctgaatactatatttttcttcttgccactatccggtttcaaaatgagcgaacacatcacagggctcagcgttaaagcaaccacagtagaaatcagtacagataccacgatagttaccgtaaactgacgatacagctgcccggtaattccactcagaaaacttaccggaacaaacacagccgccaataccagtgaagtagcgatcaatgcgcttgataatccgttcatcgctttctttgtcgcctcatagggactcagcttctccgtttccataatatgctctactccttccaccactacaatcgcatcatcgaccacgataccgatggcgagaatcaaaccgagtaaggtcaatatattaatagagaaaccaaaaatcagcatgaatccgaaagtaccaatcagggagataggtactgctaccaccggaatcaatgtagcacgccagctctgcaaagacagatacactaccaacacaaccagcaccaatgcttcaaacaatgttttatacacctcatggatagactcggagatatacgttgtcatatcaaacggaatctcataactcaatccttccggaaaattctcgctgatttcttccatcgccttctttacattcttggctacttccatcgcattggcacccggcaacatgtaaatacccagtaccgctgcattctcaccattgataccactctcggtattgtatgaagaagcctccaaggatacacgtgccacatccttcagccggatgatggaaccattggcattggcacgtaccacaatatcctcaaattgccctactgtagaaagacgtccttgagtagtgattggaatcgttatatccagtccctgtaccggctgctgacctaatacaccggctgccgattcacggttctggtctttcaaggcattctgcaagtcctgtacagtcaatccgaagttagccagcttatcaggctctgcccatatctgcatagcatagtaacggctaccaatattggatacacgtcctactcccggaatacggcgaatcacatcgagcacattgatcgtagcaaagttgctcaggtaaatttcgtcaaacttaggatcggtagaagtcagacaaagtgtcattaactgactgggtgcctgtttctctacggaaataccattctgaatcacttccgccggaagacgggattcagccagcttcacacggttctgaatttccacagcagccagatccgggtcggcagatacatcaaaggtaactgttgccgagaagccaccggagttagaactgtttgattccatataaagcataccgggcgtaccattgatttcctgttcaatcggagtagccaccgcctgcgacacggtaagcgcactcgcacccggataagacgcactgatctttaccaccggaggcgtgatctgcggatattgatccaccggaagcatggtcagcccgatgattccgacaatcacaatcacgatggaaatgacagccgaaaataccggcctgtctataaaaaaactaactttcattgattattctccttttgcgttatccttcattcctgttgtagaatcacctgccaccatagtggtatccttcacctccatttccggctgactgatccgtactttcatgcccggagtcaacttatggaaaccttctacaacaattgtctctcctacagcaagtcctctttccactacgacgttattccccacttcgggtcctaactcgataaaacgtttctctactgtatcatctttacgcattgtataaatataagctccgcctttttcaatggtaacagctttcatcggaacaaggatagctccttcacgcacgtccaaaagtagttttactttggtaaactgtcccggaagtaatacctgtttcgggttaggcatctctgcacgtacggagaaagtacctgtctggggatcgacctgcggttctgcaaaatcgacatatcctttataggggtaaaccgtattatccgccaaagtaatagtaatgttcggttgccaggaacgggtagaatcctgttgtccgaggttaatattacgttctttacttttcagataatcaagtgccgtcatactgaaatcgaccaatacggtatcgctttttactactgtagccagcagagactttcctcccggaccaacaagcgttcccaagtctacatttctttcactgatatgtccggcaagaggtgaacgaacgatggtatagcctaattcgagttcagcctgcgccaagtccgcttcactcatcgctactgtcgcaacagcgctttcataagctgcttccgcattatccagatccagctgactagcagcattttgttcgtacaacggacggatacgtttcaagtcacgttcagctttcaatgcctgtgcttcatcctttttcagctgagcccgtgccttgtcggctttcgcgcgatactgatcctgattgatcacaaacaagacctgattcttatttacataagtgccttcggcaaaaagcatgttttccagatagccttctaccctggcacgtacttcgacaaattgctgggcacggattcgccccacatattctccgaatatctctacatcatcttttataaccggttcaacaatcactgtcggcatttccggcgcagccttctgaggtcgggtcagtatccaatacactcccaacacaattaccatacatactacagcagcaatggttctctttctcctcagtttcaactcatgtttcgaaaagaataatctcatatcgaatcttattatttaatttaacttatgtttgttctacactctattatgcaatacacataccaaaatatcctgttttatcttatctgtttattatcaacatattacatttttcctcttgaagacggaagtgtggaaaacatccttaaagtgtagaatttatccacatttccgacttttagaacattttttatagttcttgtttcatcaactaaacaatttatcccctacatttgtagttatattgtacatcaacacaataacatgtctaatgaaaaaacaaatcttttcaacattagtttttgcaatgtgcctgatattacctttttctgtttattcacaggaacaacggaagaaggtcggcgtcgtcctcagtggcggtggtgccaaaggagtggcacatatcaaagcactgaaagtcattgaggaagcaggcattccgatcgattatatagtaggcaccagtatgggatctatagtcggtggactttacgccatcggttatactccggaacaactggacagtatggtacgcaagcaagactggactttccttttgagcgatcgtatcaaacgcagtgccatgtcgctcaccgaacgcgaacgctctgcaaaatacattgtttcgcttcctttcacaaagaacccgaaagctgccatgtccggaggaattatcaaaggacagaatcttgccaatctgttctctgatctgacagtgggctaccatgactcgatcaattttaataagttaccgatccccttcgcctgtgtatcggccaatgtagtcaatggggaccagatcgtattccatgatggcgtactctctactgcgatgcgtgccagcatggccatccccggtgtattcactccggtgagaaaagacagcatggtattggtcgacggtggaattgtcaataactatccggcagatgtggccaaagcaatgggggccgatattattatcggagtcgatgttcagaatgcgctgaaaagtgccgacaagctcaacagcgctccggacatattggggcagattgttgatctcacttgccagaccaatcatgaaaagaatgtagaactcactgatacctatatcaaggtaaatgtagacggattttcttccgccagcttcacttcggcagccatcgattccctgatgcgtcggggcgaagaagccgcacgtgcacagtggaattccctgattgccttaaaaaaagaaatcggtataccggacaattatgtccccaaacaacatggaccgtactcttctctttccaattcacggacagtatacgtcacagatatatcgttctccggcgtagaggctgatgacaaaaaatggctgatgaagaagtgtaatctcaaagagaacagtaacattaccactcagcagatagaacaagctgtgtatcagttgcgtggcagtcattcttactcaagcgccagctacacacttaccgacactcccgaagggtatcaccttaatttcttgttagaagaaaaatatgagaaaagaatcaatctgggcatccgtttcgactcggaagaaatagcatccctgctgattaatgccacagcggatctcaaaactcatgttccttcccgattatccctgaccggccgattaggaaagcgatatgccgcacgcatcgattacactctcgaaccgatgcagcaacgcaatttcaatttctcatatatgtttcaatataatgacatcaacatctatgatgaaggcgaacgtgcctataacactacttacaagtatcatttagctgaatttggcttttcggatgtctggtacaaaaacctccgcttcggactcggacttcgtttcgaatattataaatacaaagattttcttttcaagaaaccggaactcactgggctggatgtagaatccgaacatttcctgagttatttcgctcaggtatactatagtacattcgacaaaggatatttcccttccaaaggaaccgaattcaaagctgcctattcgctctacaccgataatatggctcagtataatgatcacgccccgttctccgcactgagcggttcgtgggccagcgtagttcccgtaacccgacgtttttctatcattccatccatctatggtcgtgttctgattggaaaagacatcgcctatcccttgcaaaatgccattggcggcgaagtatacggactctacattccacagcaactgccgtttgccggtgtgaccaatatggaactgatggacaattctatcatgattgcatccgtgaaactcagacaacggatgggaagcattcattatctcactctgacaggtaattatggcttgacggacagtcacttcttcgaaattctgaaagggaaacaactgtttggtatcagtgccggatatggtatggacagtatgttcggtccgttggagattacgttcgggtattccaatcagactgacaaaggaagttgttatgtgaatctgggatactacttctaagtcactatttcggttcctgcatacataggactatacttaccatgatgagaaaaagttctcactgcgatgagacttttttctcatcatagtgagaattttttctcatcgcagcaagaacacttgagaatattcagtatcctaatctgctgttatacaaacttttcccttttctgtagatatagtaatccgatcatcatccagactaaactggcggataaaaggaaaatgcggtttttaataaggattccctcccaaataatcggatgaacattatcgggaacacgaaaaggattcagcagaacgttccaaaaagaatccggcttacctaagaacatcaatgcaatgcctataataatcataaatacggcagttccgtttccactccgcgtaatggtagacagcataaaagccatgtttccgaaaaagagtatcgggaacatcaactgtaatgccatctcaagcggattgaccggatacagcaataaaatggctatgtatgaaaagataatcagaataacaaaaattgccacataaatcatcaataaccgcacgccccaaaccttatacttatagtcggggattccaaagagaatctccaatatccggctatcttcgtcattctgaatgccgaatacagccggatagaaaataagcagtatagacggaaacatcaggatgctatagatgagtccctcgttaatctcctcccgtttccaggcattctgaaacatgaaaagagcaaaaaagccaaatgcagccaacagaaaccagaaaaacttcccggcaaatataatcttcaggttatacctgactactttaggcaacagttgtatcaattgtttgaatgtcatatccttcttttctttttaattcatattcttcagcagacagagataagcgtcttccaaattagcttctacctctacagccccttcataaggctgtccgacagaaagatagcgcacccgaatcgtatcgccttcctgaatatgatgtattaccaacgatttgtccagtactttttcaaattctgtcttatctatattaaactgccatacttttccgttagccatttccaccatatccgaaggatcaccgaaatatttcagttcacctttattgattaccactacctgattacaggaactggatatatcctcaatgatatgagtggagaaaataacgatgcggtctttactcaattccaccagcaaattacggaaacggatacgttcgcgagggtcgagtcccgctgtaggctcatccacaaccaaaatacgcggtaaatgaagcagaataagcgcaatgccaatacgctgtttcatacctcccgagaaagaacctatcttttcgtctttccgctcgtacatatgtaccgctttcagcacataatccagacgctcctttcgtaactcaccgtctacaatccctttcagtatagcctgataatccagaaactcccacgaagtcatattctcataagttccgaattcctgtggaaggaaacctatcagactctgtaattcttctctgtagatacgggtatccagaccattgatccagatactaccatagctctgctcaaagataccacagatgacacgcatcaaagtcgatttacctgccccattgggtcccagtagtccgaacatacctgtctgaatctcgaatgatactccacgcaatgctttgaaaggtttgcgtcgttttccaatcataggaacactcttcaccatacggaaataggaacggcgaagccctgcaaatcgtccggtgacacgctctatatttacatcgtgatcatacagatactgagaagtgacatagatggcaatacccaccagccataacaatccgatcatgatgaccagcccgttattatccagtttccggaataactgaaacaggataaggggaggaagactccagaatatcacccggtttacgatctttgttacccgattatctccgtaccgataatataaataggaacgtacctttctccacaaatacagtaccgctgcataaatagcgaacgagaacaggaatatccaaagcctgttatgaatgaagaaataggtgaaataaatggcaaacagtaagataccaaactgccatagcacattgataaagtccttcagagaatggtattcattgctcaatcccagacgtttgcgtaattgcaaaccactgttccactgacggctgatgtgtccaggccaatcgtagatcttaaccagattgcggacagaaatacgtatttcttcatccggattgataacctccgccttagctctacggagactggtttgcgcaaagtatgtcatccccggtatgcctgcaatcagtgctaccagatagattgactgccaaagcattccgtcagtgtatagccagatacagattacaccggacacaaaaagaatcaggtgaatggtccatagtttacgggataacgaacggtaccactgaagcacattttccagtcccatacaaactgtcggaattaaaatcagcgtcagcatggcagaaaagaaaagtccgcctatcactgtaatggcaaaaggtgcaccgatagcccctgcatactccgtatctcccatagccaacggaagcatggcagcaatcgtggtgatggaagtaatcagaatgggacgaatacgtgacataccggcagtcatcaacgccctgttccggcggtatccccgtttacgcaaaatgttggcgtaatctatcagaatgattccgttattgacgactactcccaacagaataaggaaccctgtcagtgtattcgcattcatcagactgttgctcgaaagcaataatgccagcaaagaaccgatagcggccaacggaatggtaaaaagcaacacaaaaggcgtcactacagactcgaagactgaagcaaggatcataaatatcaaaagaaaagctgccagaataaggaatttgaaatccccgaattcatcctcctcatggaatacctgcacagcgactccggacggaagattataactggcaatcaactggtcgatatcggaacgatatcctcccaataaatctttcgaagactgaacatctctcggaaaagcatagtatacctcaatctgcttatcttgattgacacggatgatgcgcgaacgcccacgtccataattcagagacgatatatcttcgagattgtgcataccgccattggcattttctatccggatagcacgcaagtcatccacagttttctctttctgagctttttcctgtgcctcttcttcagtttccttttccggtatttcgtcacggataataatatcataaatatcctctcccaccttgaaagtagcttcggaagagtattcattattaagcgcagtcaatccggtggtaatattgccacggttaatatcataggcagtcagcagaatagggtcaaagttcagatttatttctgcctgacggggagtatacgaaacatgagtatgctgtacaaagtcctgttcgtccaacaaataacgcacttcctctgccaccatctgcatcatttcgaaatcagatcccctgatcaccacccgttcactgttgtcaccgatacccaacaaacgcatgaatccgcccagactgctcagagccgagttatctcctccgcctcccacagcatcagagacatagatttccgcaccgttaatattggcaactttagtctgcacatccgcttttatatcggctattttccgtttggcgatctttgtgtaatcttcctgcaaaacgagtgtcagagtcgcctctttttcccgaatacggcaaatcagatctttcttttccggaaaatcctccagacgttcttccagtacctttacaatcttatccgtattttcaagcgtacttccggtaggcatcacgacactgatgttgaaccggtctgaagcaacttccttcatctgttgcacattcaaggtcaatgacaaaatcaatgttgcaaaaagcaagattacagccccaaagactgtcactcccggattacgcatacaagtcttcaataagaccagatagacctgcatcggacgctgaacgatcgatactttttcataaacgacactgttcccactcttactcttcaaaagaaggtaagtaatcatcggtataaaaagtaaagctacaaacagcgagatcgtcaaagttgatataatggatactccgatatggtgtccgatcagttttatcaggaaattatcagaaaaaacgaacggcaggaacacagtaatggtagtcagggtagccgccacaatggagcgccacacttcttttgttccctgcgttaccgaacgttcgggcgtatagccgtttcccgacaaacgataaatattctcaagcaccacgacactattatccaacagcattccgatggccaacgccattcctaccaaggtaagactattgatagtgataccaaaagcgtagaagaagttgaaagccgtatagacagaaatcggtatggaaagtgcgataaaaaacaccagccgcatattcttcaggaaaagccaaagaacgaacacagccaataatccccctaccaatgccagattaataatctggttgatattattttccatggtttcagccttgttctcctgaatgacaatttccagttcgagcggagccagcttctcattcagcttttcaatcacatcggatacacggtgtgaaagttcaatcagattagcctgtgaatcattgatcaaagcaaccgagacggcttcttttccattcacacgactataagtggtttcatctttcaagtcaaaaaagacggttgccacgtctttcagcagaataggaccgggagcgacaactatattctccaaatcagaaactttggtatacatcgcattgacatggacaaaattcttactgtcgggttcatctgcgaagcctacaaatgtcttttcctgggtattctgcgagagcaaaccgcttattttggaagcagtgaggttcaaagccttacaagcctccggattcagacgcacttcaatggctttctgccgtcctccgtagatattgacggaagctaccccatctatattctccagatcggaacgaacatcctcgtctaccagactccggacacggtcggttcctcccgtaccacgcacctgaagcaccatgaagttattattcatctgagcaatatccactttctgtacctgtacggtaaaaccggtcggcagggaggcagcgatttcattcaccttctcttgcagtttaagactggtcatcttgaagttgatattctttttaaagtcaatctgtatgctggactgcctcctgtcaatgtaggattgcagtttgtctactccacctatcgcactgaccgctccttcaagtggaataatcacttccgactctacatacgaagggtccatatcctgctgtgacgacacctggacaaacagaaccggaagttctgcgttgggcagcaactccaccggaagttgtttatacgacacatagcccagcaggctgagtgcaataaacagcatacaaatcgttattctcctatttagtaaaaagttcatcttcagctgtttttagttcggcgatttatacgtcttttgatattctccaagacataatagacacaaggaataaccatcaaactcatcagagtagaagttatcaatcctccgatcacagctatagccatcggtgaacgtaaagatgcaccttcaccaaaactgaatgtcatcggaagcatggccagaatcgtagtcaaagtagtcatgatgatcggacggatacgctgttgccctgcttctacaatggcatcagtcaactccattcccgcctgactaagctgattgatacggtctaccagaatgatagagttattgacggcaatacctcccagcatgacaataccgatgactcccatcatattgatagtagttccggtaatgaagaaaagtaagatagcacctactacagccagaggaatagtcagcaagatcgtaaacggatgcagcaaggattcaaactgggaagccatcaccatatagacaagtacaacagaaagcatcagagcaaacaacagactgttcattgattcttgccgtttttcttcttctcctgtcactgtgatactgtagttagcaggcaattcaatacctttcaccgtttcacgcacttcggctgctactttatccagtgatttactcgcatccatattagccatcaccttaccgatacggctttgattgcgacgcagaatctccttgggcgcttgtccgtgagtaatggtagcaatctcctgtaatacaaattcctgtgttccacttttgataacaagagcaccaagagaactcaacgggatatccggcacctttatgacaatatcacgcatttcaccacgatattccatcttaccgacttccttaccgcttagttgctgcttcaattgttcgattaccatagccacactcagattattgataccggctattgtacggtcaatcgagatcacaacttccggagcaccgtcttccacggaagtaataacatcatagattccatttacgccaatcatccgttccttcacctcttcagtcaacagagcaatctcatccagctcctctcctttgacctccacaacaataggagccccttcgcttcctaacagtgaactcagagaattctcatcctgctgaatcgtcagttccagtccgtcaggattcttagccgattccacgaaagacgcaatcaccttttccggtgaaagtgtacattccggtgaaaggatcactttcatcattgctgtattttctccttcaaatatcgcattttccgaaccgcttccctctccgatatgactgtataccgtacataaagaatcaccgccaacgatggtatataacaattcttccagattacctacagcagcggaagtgcgttccatctgtgtgccttcgggcattttgactacagccgtgaacgtcttgctttccgcacggggcataaactcagttccgataaacggagtcagcaatccagtcacgataaggagcaacactgccataccgatcaccagccaacgtcgctgaatcagcttgcgaagcactctgctatatcctgtaatacgaatggacttcacttcttccagcttaaccttcttgccggaaagctggatatataacatcggaatcaccaggatagccacaaacaaagaagaaaccagtgagaaagtaaccgtccatgcctgatctttaaacagttcgcccgaagctccgtgaagataaacaatcggcaggaagacgacaatagtcgtcagagtagaagctattaccgcattggcaacttctgctgtcccgttaatagcagcctctttgatactcaatcctttctcctgatttcggaagatactttctatgacgacaatggcattatcgacgagcatacccgccccgagcgccagtcctcccaatgtcataatattcagtgacagtccgttgaagaacatcagattgaaagtagccacaatcgagatgggaatagcaagactgacaatcagtgttgtccccatccggcgaaggaatacaaacaagactacaatagcgagaataacacccagaacagcactgctcttcacttctcctatcgcactttttataaaagtaccctgattggaaatcacctgaaaatgataaccgggcaatgcattctctatcactgccaattggcgggttacctcatccaccacttttacagtattaaagcgcatctccttataaatagacagtccgatactacgcttcccgttaatccgtacaatgttctccggacgagcgttcaaaaactgcacagtagccacttccttcaaaaaaacaggagctttattactgttggcagtcgctgttcccgaagcattgtttccggatgcttcctcttgttgtatcgctttgtatccgacaatcagattctcaaaatcatcttccgaagcaaacaagctcgaacttttcaccagatattgtaatcccagttcactgacccgtccaccggatatgctctgattattcgattcgatgcgcgaagcgatatcttctattttcagttgaaaagcatccagtttataaggatcagtctgaatggtaagagtactgacttcttctcccgaaagcgtcacttcagccacgccttccagacgaatcaactcattacggatatagctttcggcaatcttcctcaattccgccatatctgtaatactctgatgagacattcccaccaaaactaccggagacaagttcgcatcgtgttgcgtaatcttcagttcagtgatatccttgttctgggcaaacggattcatggctttctgcaaatctagaaaagcctcatccatatcctttgtccaggtatattctacagtaattcgtgctgtcccggctttaatcacggaagagacctgagtaacatcactctgccggatcgccatagactccatatttttaacgaattgcttttcgatctcctcgggaggacgttcacccgcctttaattcaataaacaggcggggattattcagatcgggcaataaatccacactcaactgatcgtatgatacttttcccaacaataagagggcaaatactaccatacaaatcgtaaccggattgcctactgcaaatttgattatattcttcataagtatttcctattttcaaaagatgcgttcatatatcgcatccatgatttacttttggattttgactttggcgtcttctttcagtgtttcaaaacccttcactaccaaattgtcatttacattaagtccggatagaatttcgatattatattcatcctccagacctgtttgcagattgcgtatctttgccgtattcttttcgacgatatatacgtatttccggcgacgattggacaggattacgtctttaggtataatgatagaactatcagctctgtcaacgataatatctgctttggcgaacatacccggacgcaacttcaactggtcattatcaatcagaatctttcctttaaaagtacgtgtctctgtactgattgcaggagacagctcaccgactctcgcttttaaagtatctccggggatggtataatgagtaatatataccggttgcgcttccttgacataacgaatgctgctttccggcagattgatatccatatacattttatcataagccatcagactcaccatagcctttccctgctccactcttgtatcggccgtatagtgaggcaaatcaacaatcacaccatcaaacggagctttcactttcatcttctccagattgagttttgcgttttcataatcgtaacgggcattcgttacttttacttccgtattccgcatttcactcatcgtcacccctcctttttcatagagagctttctgctttgactgttcctgttcggcaatttcaagacttagttttttagcgtcaatagcgattccgttttcatactccttgtcttccagacggattatcagttcccccttacttaccctgtctcccattttgaaaggttttccggttctcggattagtctgaagtttataaaatccgctcatttccgcattctgagatgcaccgtaagtcggctgcactgttcctgttgtatttattaatttactgatagaacctttcttcagctccacgacagataccggagttgcaatattattgggtgcgttttgtggtttgttgccacagccggttaacaataaggttgttaacaaagaagatgcaataaaaatttgatactgtttcatggtctgcttattttttatcaataatgtctttcataggaacaagagggatattcttgtcgaaatcatacaatgaaaggattttaagattaagtaattctattctgtaattaatcaacgcctgcgtataagtaatcttcttattcgaaagctgagtctggaactggctcatttccataccggttatgtcaccttcccggtaacgagtctgattcagatcataggtcaactgtgcgttctgtacattttgctcggcgattttaatctgagtccggaggttttcgaggttacgccatacctgacgaatattcagctcgatatccactttatcctcttgaaactcgagttcattaatccgttgggccatcttttgtgctttaatccttgctttcttttcaccccagtcgaaaataggaacagcaaagctgatagaaaccctcggattctgtgtcggattattatagactttattcaggtggctattatctcctatcaatccgaaagagatggatacatctcctttaaactcgttcagcgcttttgtcttaatcatatcgaactcaagttccttgctctctatttcacgttgacgaagttccagacgcgaacccaatccatgcgatatggcctggtccagatttacctgaatcggtttaatctccacttccgcaaatacgagaatatcttcatccaacctcattccgagagtctgtttgagtttgtccttcgcattctccagattcacctgactttcgtctacagacgaacgtgccgtagccagattcagttccgcttgaaagagttcgtccttcgctgctaaatccgcttctaccttattcttgataatatcataactttgctgggcattaaccagttcttcacgactgatttccagattactctgtgccatatagacagaatagaactgatcggttatacttttctccgtattcagttgctgcaaagcataactgatattggcattttcataatcatattctatttgcttcagttccattttacgcttgttgtatgtgaaaataggctgagtcaattgaagatagaggtcattgctgaatgcccggttactagttttatcgccttctataatggaactgttgtcctgccagccgaaacggttgattaaagaaatagtaccgtctgtccatagaatgggctgatcgacctgaaaggtcccactggtattgaatgtttcattcgtgtaccattgtgacagacgattatcgaaacgcctgttcttgttatagtccaccgggttcagatttaatgaaaatcgagattttaatgaagccttctgcgccagcagattctgcttatatctctccagattcatgtaggaacggcgaagagaaggactgttctcctgcgcaatctccattgccttgtcaatcgttaaaggaatttgtccttgtgatgtcagggcaattcccgtaaaagttacgattgtcagcagcattctttttaatagtagtaagtcactttgcatatagtttgctgttttaataattatcgtttcactattttcactgcgtcggctgtcacagaacgcagcttacattcatccgtcagcacgacacgaaccgtatcggcactaaaatagtaagtaccgagttgttcccaaccctcattggcttttctcagattgatataagcatcttccatctcgctgtcgtatgccaccctgaaatgatattcaccctgaaggcgatcattccatcgcagctcatcatccttgaatacatgataataaagctcatattgaccggcttccggcacaggaattttccatgtagccgtctgactgccgtctccactcttaatcacataggccgaacggatatatttgccatagtatttagcattggtggtagctgtccattgtaaaggcgcacgccaccaggatatgcccgaatatttaaaggaagtatcctccactttatccagccatttaggcagaagtcctacgacagcaggggtagaaagtacaaagagagtggaatcttcattatccacaataacctctcccggcatttctaaggatgattccggcaaggtatagatagtgtccttgactattttattccgttcttgttttacattaccaatggattgccgtatcatataaggaagattgccggaaaccatcgtattgatttccacatcacgtatctgttcttcccagacagaaacaaattctttgcttgtatgggcagctatctctaccttttttctggctctaggatcttccatcggttgataccaccagccattttgaagaacgttcatctgaatgattccgtcataatccgagttattgctcaccagtactttcaagacaaagaattcttctcctcctttattgacaactttggtcagttcgggctctccgatcgaataaaaaggaagaggcgtcaactgttcccattctttcaaatatgaataaagatccgtccggctcatttctcccagagtatccagcatattttcgaactttatgttcagaaatgtattacgcttcaacatcgcatatagtgaatcccggaaagcatctacgcccatgtttatttctgaccgggcaaaaagacggcttgcctccagtcctacgatattattttgcagattacgctgttccacatcagccagcaactccttgaacgtatgcttttccagcagcaggttggccttttcattgttactaagcccatttatctgacgttcccatccttcattttccgacttcttttgcagatatagctcaatagcccgattggcaacaggccattccgaagagtaaatattgtaacggaaattataaatctgcgggaaaaggaaataaggatttgccgtagacgaaagatttccccgtcctctactacccgacgaaaagttataatcgccttctgtctgcaaaaacatccagacaaagttactaaaagtccgcatctgggcttcctgcagactgatttcattatttcccgaccaccggatatgattcttcacctgcctcttcacatccagttcccagaatatagctcctttttcggggaacaataccatttcaggttgtactgtctcctgcgcttgcgaccaggcacgttcatagctggcaaattgcacaggaacttctacaatagaaaatcgcttaaaaggataatccagtttatattgccgtgccagttgctctttcacattacgtatcagccagggaatggtatcgtgaatagaatcaaacgaagcagtaaaatagtcatggtcccttaaatgccaaacgctataaagaatgctgtccgcataagcacttttttgctgatagtcacctatgaccaacgatagtgtctgagacggataatctcctttaaacgaatacactccttcttcatcacactttccttccccttgagaaagaggaactaaccccggtagaggcttgaccttcaagcgataattactgaaataagtttgctgccagtcaggatttttatcactatagcttgttcctgcacggggataccaataagtttcaggggtaagcatcagataatttttcgtctgaaaactatactgcttgtctatgttgaacagaaactttttattggaagcttgcagcacttcgggagggatatccaaataacagaatgagttatctatctgtccgtcatacctgaatgttgcagagattgtatcgcctttggcatgcttcgtgccgaaatccaccaatactatttgcttgtcacgtttaaacttgagttgctgtccggccgaatgaacggaatgaatggttaatcccggattcaaacagaaggtgaatacggcagatgagtccaatgccactcctttcacagttacttccgacagaaaatcttcaggatgctgctctacagaaagatcatattcatgaatgaacatcttcggagtagaaacatattggttgttgatcttcgtataggtagcgcgtatatcactttgatataaaatcgaatgtatatgccaataaccgcatacgaaagctaacatgagagtacaaaaagaaataaccagccacggataattactgtgtgatgaattcggcagacgcctgaacagggaaatcgtgaaaaagacaaacgccagtccggcaagaaaatagatgccacgatgatttaaaatcacctcccagttggaaaaaccgacaatgctggacttcaccaaaggaagactataagccatataatcgaaaagataataaagcttatcttcaatatagaaaacggtaagtccgatatatcctaacaataaaacgaatgtcagtgcctgatttttcaataccagcatcagaaagatagccaggccgatgatgaaaatcagcgtagggacactgatcaacagaaaataaagcaagtaagccatccagtccacttctcccaatgtcaggttgaatgcagccgtaatagccataataatgagattcagcaacaaaaagacgcgcagatttccccaaatcttaccgatgacgtattcagcattgcttaatggacggacataaaagacttctgatgtatccagctttttatctcttttcaggaagtcggatgccagaaagatagcaataacagcctgccctgtatttagcaacagtaaaattagataaggaatgttcgatggaatggctgtagcaatccagaagcctccgctatcttccgatacgaacaactggaaattgaaaaaagtaatgatagttacagcgagtaccgtgaatactctgaagaaccagcttctgattaataatttactttcatattttgctaccgattgtatattagatataaaggtcatatcagcatatcgtgtttagtcgtttgtccaaaggtttaattgattctccatataatatacataggcgtgttccagattagggggaaatggttccgcttcgtatccttctactttatcggcaaccacctgtacttcccagattgtccccgatggaatcgtggagatcaccggatattttttatcgatctcatgcaactgatctcccgcagccctgattctccacactttaccctcggctaatttcagcatatcttgcggagaaccgttgaaggaaacttgtccccggttcattaacgccatattgttgcaggtactggatatatcaccgacaatgtgagtagacaaaataatagtcacgtcgttctcactgacctccgaaagaaggttacggaagcgaatacgttcttccgggtcaagtccggtagtaggttcatcaacaatgattaccttaggatgatgtatcagcgcttgtgcaattcctaaccgccgcttcatacctcccgataatttattggcatatcgttcgcgaacatcgaacaaccctacgttttcgagcatttcatccacagcctgttttctctgcctgctatgggtcataccggacagacgcgccgcgtaatcaagaaactcatacgttttgtatttggcaaaaaaacgaaagtcctgaggaagataccccagaataccgcgtatttctttccgctgcttcattaaatcataaccgcaaatttctacttgcccggaagttggttccataagggctacaagaatacgcattaaagtagatttgccggcgccattgggtcctaataagccaaacatccctgcaggtatttccagattgacatctttcaaggcatgatttccgtttggatagatcttattaaggttcttaataattatgctcatgacattttatttgtcctatgttgtattgggtgataaagataggctttatttacaggatacaaatcataattataaacattaacttatattagtagaattctgtctaaaatgaacattcaacaaacatccatatatctcataaacgaaaaggaagaaaccacttcacagtgacctcttcctcctcatatcccatatgattattgcccaacagggtttataaaaaagggttttattaaaaaagggttatttttatgatcttaattatttattagttacttccacccttaccaccactatgagtaggattagtagtcactgtcttatactgatgatcagttccggtatagcgtgttgcaattactgaaatcttcacatccttattattatacttcactgtggtcgacaatgtagtagtacgagtcttggcatagcaagtataagtcattgttgtataaccgttcacatttacagtattataggtacgagttgtttctgtaatacctgatgccgatcccatcaatgagtataaacgagttttgaagaaagctaccatagcattaactgtttctggttttgcacctgacaaagctttttctacagccgctttaatatccgcatctttacattcccaacccgacttttctttataagtcaatgcaattcctgttacagctttaggattttcactgttatcacgacttgcctgtcctaaaatctcactcttcactacattttcagtactaactttactagtgactttattttccatagcataggaagagaaatgcttaactttagttgtgtagctacctgatttctcatcataaacaactttattaatgtcctctgtttgtggaacccactttccattctccaaataagtaagtaccatatcatcagcgaaagtcaagccaggaataggattaggaatagaaatagttggatagtggtcttttgcaaatgtcaaaccactaggttcaaagtgtgctgccgccaaaggtatggtcttttctacttctttattctcttcttctttcttcacttctgtagtcacagtttctggggctggtacatacgtagttacactgacttcagcattaccaccttccagaacgtcttcattaccttctgtctgaattgccccagctgggatttctaattcaggagttacaagaggaagatcttctttcacatcctccggttcaacagtacccggttctttaacttcctcattcgaagcactcttatcttctaccttaacctcttctgtattaccattctctccaacttctacagtcgtaggttcactttgcttagtcaaagccacagcaacagtcaccacactacgattttccgcattagcagcaatttctacagaagtactttgagcaagataacctttaggagcaacttctacagaatacttacctacattcttctctgttacagagaacttaccatctttgtcagtcttaattgtctcagtaccaatttttacatcaacaccagacacacctttcccggcatccgtcacagtacccataatgtaatactcaacaaccggagcgggagtttcaatcacttcacctggctcttgctttggttcatcgtcatcatcatgacaggaaactgttacaaaagacaacacaccgaaggctatcgccaaagagcatgcatacaaccattttaaatttctcataattgttcaatttttgtttaaattactaatatcaactcttatttaagttttgtcttttcattggtacgaatcaaataataacggatataatccggctgccagaaacggctgttttcagcagatttcggttcggttctatagcttacccccaaagcacggcgagcaaattcattcccactacgcatgtcatattgaaaagcgaaataatccggaagcatcacacgtaccgcgtgacgactacgcttcttacccggcaatggaatcgaaaaatgaaatccggcatttgtttctccatctgtatacatgccataaattcccacgacatattcaccgaagtaacgtgaaagaattccgcataccccataatctccatatataaaacgtccaccgctaactttcaattgagtattcacttgtggaatgaaataacctacgctaagctgtccattcactcttttccatttactcattccccagtcgttgccatataaatgagacgaaccggttataccaccttctccttctactgtccaacggccgtcagaagaaaaataaccaataccggctgcgagtccctgacgatcatccgagaaatttccaccagtcaggtatcccttccaatgattatccagacgaaattcctggcgcaatgtcaaataccccggtcggatgcaatcccatttgcccggctcattattgacgataggtaagcaaacctgcagcctcaatgaagcacctttccaaagttgcatttctacagccggttgcaattcaaaagctgctttatataatttgtaagtaacattattaactaacattacccccggataaaccactacgtccactttcccaaaagtagtagactctcgtttggttccttttaaggcctccattgcagttttggtggaagtagtcatctgcatattacggtaaactccatccaaatcacattttcccgattgataatcctcaatcagcttcgcaggcaaagtgatacaaagttgcggcaaagcattatccaatatgaccaactgcaatgtagagacttccggaagagtgatcaggcgacgtattgcaatgcctataccattataagatcccctatatacggaagtctcaaatgctgccgtaatcgtatcctgcttctgtgctacagaaatattttccatttgcaattctttcaggacttcagatatcccagcagattgcgcatccacactttccaaagtgcagcaacatattatatatagtatactaaatactcttttcattttcttaatgtattaatgtacattcataacgcaaaccggcagaaacacaggtaaattcgcgtgtaaacacatggacggacaaacgtttccaaaaacgtattgctccacccaaattccatccattggtatcatactctgccatcagctttaactcacggcaaaaagcgggagtataacgaataccaccaaaagggcctttcttgaaagccggttgattgccctgatgaaaataccagcctgctgtaacagccaactgatgccccttgcagaaaccaaacgtcttagttaagacaccataataatctccccaatactgagtagccttttctgtaaaaagatcatcagcaccaattaccacagcagggaaataacggctttctttcaatggacgaatacggatagtattggaacgatcttggttgtgataaccgactctgccattatatgttcgcattttgagtaacgtcatacggtaagtcagttcaacaaaagagaacaaagacatgtctacggagtaattcatggtaggatagttaaacttattaggcgtaacctcttcaggaaggaagtttgcgcttcccataaaggttcctgtttcctgcatctcggctgtaggtatcatcatctgcccagttgccccaagagcatattgtgcatgaatccggcttgttgtcaagattagaatcagaattaatacaacaccctttaatggaataaatcgcatatcccccaaaatagcttcagtttgtttcattttttatctatgtatattcctaaatagagaccttaccccaatttgattcataaatcctctatttttaccattcttttttctgttacttcttaggtaacggaaaacacaggggggaagggaaaaatctcttaaaatacgaaagataggacatgccaagccaccaaaggaagctcagtctaagcgtagggtgaaatttctttgattatgggacgtaaaaatcttagaatatgaaaaaaagggttctttcatgttccaggctatttttatcttatttttgaatcaaaaaagaaaaaaaggacagtttatttgcttgttatttattttttttgtctatctttgtgccattattatttccgttacctaagaagtaactcgcatatatttatactgattattaacactttatatcatttacacgttttaccaagcaattctttacgtaagacaaattcattttatttacttcagtacgttctttcaaagcaaagcctttaaggtagatttgtgttgttttgattgatttgtgtcccaacgattcgctgatcatttcaataggaactccgcgatatttcgcagtggtagcccacgaatggcgaatggtataagaagtgacaggagaagtcagatgcaaagcctttgccagtcctctcaaatggttattgaaattccggagggcagactggtattctcgataagcactttcatctttccgctttttatcaccattcagaatactaaatagataatcagggcaatccggataagcaggctgcctgttccaaagctgatcaatcatatctttagcggtatccaatatttccacactcatcggagtcttcgttttaacacgattataatgaagaacattcctgtctaaagacgacttctccaaatgcgccaaatcagcaaacgacataccacagaattggaacatcaaagcagcaatcgcctgtgtacgtcgcaaaatatccgatttcggatctccgtataaaagcttatgtaactcagttgccggcaaagccttcttttgacggacatccactcccgtatacaccccgtgaaacaatcggtgaacataaggagcccttcccgattctactccacgattataaatactacgcagcatacgcatatacgtcgaaaccgtattaagcttcaagccacgttcataaagatactgcccgtaacaccgtaagtgttcgcgggttacttgtccgaatgacacggtaggagtgccacaaaaccctctaaaagaaagaagtgcattttcatacacatgcgcagtagaatagcgcccctcttttcgtaaacgaccgatgtacatctcagcgcatcggctaaacccattttttttcatcatttatacactagttaattatataaatcaccttctcagatgagagaacaaatatacttcctcttagggttttaaccatcacaagaattattttatttcgaacgaaaatcagaaagcgaccctcactcacgtgaaagtcgctttctgattttcataacttaatgaacaaactaataaataattaaccttttcttaaaaatctcaaacattatatcttaaacggttgcatcttcaaatataccttatagtctttaatcatccccgttttaccggcttcagccctgggtaaataagagaatcccgtaataactttatcttcaccaagatctatcacaatctgatgaggaaatgcaggtttggaagaggaataattggtatgccaaaatgttgattcctgcaaatcaaaaacatttgttgcaatattgttcgcggcatccgtttcctcactatcggcataaatcactttccaatgctgacgggataccggtttgccatcttcgcccaacaactccaattctgcaatagccgcgaaatctttcccatcatgggcgttcaaagcctccagacagaagaaacgagtctccaccttcttaccgaatttcacatgttgccaaccattgcctgacttaaatatcccttgataaacaggagtttcatttgttaagtccaagttctcacccatcttacgatgagcataagctccgttaccacgttgtacatccagaattggttgacgcagaccttcagtttcggcttttgaaggaccagccatatccaatataatgatttcattctctcctttcttcaaccagcagcccggcacatataaggtctgttgaggtccgatttcccaataacgaccaatcgcatgaccattcacccataccatacctttactccagttcatcatattcaagaatgtatcccctaactcattgaggttaaacgtcgaccggtaataagccggttgattgccagcattctcctgttgtttatactgcttatcacgggcaaaactataatctaccggaatagtatataccttccagtccttcaccagttcaactcctttatccgattgcagttctactttctcggtaatacctttccagtcataaatacctttgccgaaattcattcttcccattgcttccaccaggatatccagtctgtcaccttcttgcagtggtggtaactttactacaccttcccccttcaaacggctcagagtagccagtttcttaccattcagaaagacttgtgcccagtcatgagcttctgtgatcagtaatgtctgttctttatcagaagcggataatgaagtccgatacagaatactaccccatccctgatcaaaagcttccattgtccggatatcctcactctctttggggtgaggcagattatcaaacaagactgccacttcagtcattttaatagcaggaatagctatagtcggtatcgaatccggaatttccggcaaggtttcaccttccggcaggtagttaccaagcagattccgtacttccagatatttaggagtcactttaccggattcattgataggagcatcataatcatacgatgtgcaagtcggtgaaaagttcgggaaattcgcgcctccccaatgcccgaaactagtccctccatgagtcatatacaagctgaaagaaatattgcggtccagcatttctttcataccttttaccaattcttcggcacttcttgtttcatgcttggctccccaatggtcaaaccatccggaccaaaattcactgcacatcaatggagtgtccggccgtagttctttcaaccgtttaaattgctcgtcgatgttagcacccgtaccgaaattaatagtccagagcaaatcatccagtgcattattctcaaaattcgagttccagtcacactggaataaaggaacacctgtaaaaccggcttgttttaccatgtcacggatttcggatatatacggcttatcgattccaaatgctccatactcattctccacctgtaccataatgatattccctcctttactaatctgaagatcagccagctgtttgcccacttcgttcaaaaagagtttcacacgttccatgtagtatgggtcttgctcgcgaagtttgatatccttcttcttcagcagccaccaaggcaagccgcccatttcccattccgcacagacataaggtccgggacgcactatgacatacattccattctcttgagccaaacgacaaaacgcagctatatctttctgtccggcaaaatcataccttccttcttccggttcatgaaaattccagaacacatacaagcaaatcgtattcatacccagtgccttgcacattttaatacgatgttcccaatattctttcgggatacgcggataatgaatctctgccgcttttacaacaaacggttttccattcagcaagaaagtattcttccccacttcaaatgtgccctccgaagattgagagcatgagctgccaagaacagccactactaaaataagtaaatacaataaaggtttcttcattttctatctattgttttcatgatatatctcatacttaataaagagaattcactatcggctaatgtttccattaaaccgacagcgaatttgaaaataatccaagtgttcctaaaaactaaaataatacctattgaaaactgagtacggtgcaaagatgaggtattatgcgcaaacaaaggtcctcaaataagtcaaaagggtatgaatatcgttcaaatgaactttatttatcattttatgaactctttttacagaaaaaatcaagatatttgcaagaaataccataaacactaaaacacctcataacgggagaccttatgaataaaacgacttttatactactaataacattaattatatcatacataaatactgcttatattcaagcacagactcaacgtgtcacagtacaggggagtattctggaaaaagacacacagttccctgttgagcaagctaccatacaactgttatccttgcccgacagtaattatataaaaggcatttccagcttggaacagggaaaattttcactcacaactctcccgggacgttttttgctaaaaatttctttcataggcttcgctaccgaatataagcccctgcaaataaacacaacccagactattgttcaactaggcaaaatagagttgaaacctgatgctgtacttcttaacgaaaccgtcattgtagcccaagccccgcctgttgtcgtcacaggtgatacaaccgcatataatacttccgcttaccgcgtcagtgaaggtgctgcattggaagaactagtcaaaaagctacccggagccgaaataaacgaagaagggaaattaatcattaatggtcaggaagtcaaaaaaatcatgatgaacggagaagaattcttccttaacgaccccaatacggttttaaaagaactgccagccgatatgatagatcaactaaaaacgtaccaaaagaaatcagacatggcacgtattaccggagtagatgacggtaaagaagaaatggtactcgacttacgcgtaaaaccaagtatgagaaaaggatggaatggtaactttgaagcaggatatggaaatgacgaccattatagggcaaaaggaatggccaatcgtttcaaaaacaaaatgaacttatcaatcaatggtaccgccaacgacaatggaattaattccaatcaaagaataggtgccaactattctcagaatactcagaaactcaaatatggaggtagtattgaagtccgggaaaataaacgcgattcatggagcaagcgtcatacagaatcttttttgtcagacaacacttctcagttttccctgcagaacaaccaatccgatggaaagacaagtgctatttccgctaattttcgtttcgaatggaaattagacagcctcaccactattatgtatcgaccgacatttaatttttccaaaggaaactccaattcaggcaacttctcagaaacgctcaacaacgagtcaactcctatcaaccggaaagaagccacaaaccaccaaacgaatgacagattctccaccaatggctctttgcagttaaaccgcaaattaaacagcaaaggaagaaacatcgccttacgtctttattacgatctggatgacggcaattccgatcggtatagtcttttgaatacttattacttgaagtatggtgatagtataaaaactttaaaccaatggattgaaaaacttgacgaaaacaataaatatcaagttcagataacatatatggaacctgtatttaccaatcggtttatcgaaattaattatagctatcaacaccgttcctcactctctgaaaaatatgcctatgactgggataaacaagaagatacatacagtcaatatcctgacacagcgcacagtgattgctacaaaaataaatattccacccaccaaaccggcatatttttccgtactatccgcaccaactatttttataatataggtatagaagttgaggcacaaaaaacgacaaataaaagctatatgcgggacacgacctttgagtatttatccagaaatgcaataaactactcccccaccataaactttaagtataccttctctaaacaaacaaccttaaaaataaactatcgtgggagaacggcacaacccggtatgaccgacttatatagaaaaaaagatatttctgatcctttaaacatacggctagctaaccccgaacttaaaccatcattcaataacaacatatcagctacatttaatacttactttactgaaacatcccgtagtttgaatgctaacctctcctataataatacaatgaatagtacaacacgtattgtcacatatgacgaaaataccggaggacagactacccaaccgactaatgtgaacgggaactggcgaataaacggttcgcttaccttcagtactccattatccaacaaaaaattcacagtaaatacacacaccaatacaaattacggcaactctgtcggtttcactgtgctcaacaaagagtcagatgcagttaaaagtaatacaactaacctctttttatcagaacgtttaaaaggaagctaccgtagcgacctgattgactttgagttatctgcagaagtcagatatcgaaaatcagaacattctatcaaaaaagagaaccgacgggaaacatttgattatacattcggaactgaagcaaacttaaacttaccttgggatataaaaatctcatccaatatcaattgtagattaaaaagaggatatggcggtaaaaatgatactaaccgcaccctatggaacgcacaaatatcgaaaagcttcctcaagaagaaaaaggcaaccgtccgatttcacctatatgatatcctccgtgagaatgaaagttcggaacgttccatttccgagaattctatcaccgacagagaatccagtacatctaacgtatattttatggcatatattgcctatcggttcaataccttcggacaaaaaagaaaacgacaatcggtacaaaactaaaattataaaagaggaggaaatgatgtatccacaactacatcatttcctttttgttctttaaacatgctgagtaacattgaaaaaagtcatattgcaagatatcagagattctcaaaaggagttcggtatcaatacttgacttcccgaagattttatacacattggtccgcgcacaacaaagctgttctgcaaaccaagtgacagacaatccttgtcgatgtagttcaatttctataagccggccaacgtgtgtcatcttactcttgtggaataattaagaaactgaaaccacacgctcctcctccgccattttccaatcgcacaagaatacggttccacccttgacggaactggaaaggagtaatatgttcgtcaatattataccaactggtaccataatcgcgccatacatccttaccatttatccatacccggccactatcatccgtaccgatggcaaccaacatagtagtagcctcatcaaaataaagttccgtataagcataataagtagaatgtccggtagtgacaggaaccgtattatgcattgattcactttgcataaacttccatcgcagcgtaccatccaaatacacttcttcccctatgacctttatcggatgagaatccgtttccatcacccctgtacctacttgtccgtcagtatataccgcatcaaagtccacagatatctcaggcggatggacaattgaaaagtcctctcgcccaaaactttcccacggtcctatcatataccatgtgttaatatataaccaccctttacgatccgcgctttttgagaaacgccgtccgggcaatgcctgagcttttaccatttcctgattaagccggggacctgcataagcattcatcggacgtctgtttccactgccctgagctgcctcccccatgccaccgaaaccgttcccattgccactgccttcacctccgcccggctgaccattgccaattccaaagccgccaccgggctttccgacctgcttcactactccaaagagattttccaaccgagattgagcaagtccggcttgtcgggtcgcttgtcccaacagaccacggtagttgttcaagtctgccgtactttttatttccagacctgcgctggcattacttcccgctgaagtagcccattcccctcctttagtctgcattcgaatcagttcttcaaaacttggcatacgggaagaacctgtcttcagagaactataaacctcgggaaacgaaagtcccttggaaagcgcctgtttagctgcattggcagccaaatggttctgctgtatttcagcctcatattctcttaaaagagcatacatatcttctaccgacggattcgcagataacttgcccgcctgcggaatattccttgctttcgaagtatcattagcatcatccggtgccgtacgtggtaactttctttgctctactttagtcaacaattcatttttccgctgcctcatcttcttagccatttcctgaaatttacgaagctgatcttccaaatttttcttgaccaatacttccgactgcttcactaattgctcagaataattagcgggaagctcccgctgagcctgctcctgctttattttatcactgatacttttcggagatttctgttttttcgcttgcaagtcaatagctccctgtcctggtgatggcatcagccagataaacaccgctcctcctaccagacagaccagtgcaataacccatgataggataaccgtcagacggctactccctgttgtagttttcgtcatatgttcgtattcctatattcgttaaattataaaactgacaagcatccattacttccacaaaacgtccgaatggagtgtttttatccatatcaatgcggatacgccgacccggatcagagatacaggtctcccgcaattgttccatcatgaaattggtcgaacaaggttgtccgtcccaatagaagttaccttcagcatccagtcctacaatagcctgtttatcatccggtttcagttttatggctgattccgaagtcggcagatccactgaaatatccctgtttttcaccttcgtcattgtagagacaagaaagaagatcaatagcagaaacacacagtcgatcaagggcgacatagacacttccggttcatcttcattattaaatagtgataatctcataagcttaataaggtttactacccaaacggacacgcgtacgcgtgaatccttgtatttgacattgatcgaatatctctattaccgtatttacgggtacagtccggtaagccgccacatcaatagcaatttccgtaccttcactgttgcggagttctgtaaggaaagtattcagatcagaaatcggcacatagtggttctcaccagtgtacgcatcatgtcctactacctgatacacatttttctcctcatccactgctatgataacagcttcctctccggcgcgggtggtagacaagctggaagtcattgaaggaagtgataaaggtatttgcatttcccacttcttcatcatagtagtcacaaggaagaagatcagtagcagaaagacgcagtctatcaagggcgacatctgcacctctactttgtcttcttcatcatagtttagtctcatgcttctcctccttactccccggtgtgttcatatccgtcgaatctccttccagatagagagtagtaatcacattttcaacttctacttctaccaaagaagccaatttcataatacgatttttaataatgaaatacaaagcaatggcaggagctgcgatgatcaaaccggcagcagtcgtaatcaaagcttttgaaatagaatcggacaatatagaagcgccgccttcgtcaccatacaatgctaccagaccaaacgcttcgatcataccgacaactgttcccagcaaaccgataaggggcgacagggaagctatgactgacaaaggatatatgcgtgacaaatgtgtacggatatcacgtgcggccatatcaccagctgtctggctgacagcttctcttccagctttcacatgctcgaaaataaaacgcagcgaatttcctaatgtggaagggtatttatcacaggctgcaatcgcacctttcaaatctccttgtgcaaggcattcgctgactgttttacgcagtccttttggtgccagtcttccttctcttgaagttagcaagcgttgcaaagctattactaaggcaagcaatccaagcaaatacaacggatacatcatgaatcctcccgctttaatctgtgcagcccagtcaatctgtactccttgcggttgttcatcctcattagttgttccctcttcatataccagcccttcctcttctccatcaacgggtaccggagttgcaatttcgctcggaagtactttcggagcattctttatatcatcctgtgtcttagcgagaaagatttcatcaaatcccgcatcacgcctctccgggcagataaaagaaataccggtcaacgtaatattaccaaaatctttccataagtccctggtcatcaccatccagtgtcccggtagctcaccgagattaagaccttccatcggatttatcaaatccttggatttgccggctatataagtaaaatcatatttcttgcctttttgatttgcagacttttcggaaacatgaaatttcattccaatttgatcacctccccattttacccaggcaaaagtgatatagcgaaactcacccggtcccggattctcgcgaataggaatggatagcccggtcaactctgccggacttttagaggctcctacatatatataattttctgattttttagagtatcccccatcacggacaaatttattatcctgagctttccactgcgccccgtccggtattttagtactaaacagctcgtacaatcccttactggattttccattcgtttgtgccgagagcggataagtgaaaaacgttattactcctaaaagaagtatactcaacgtaccttttctaaaaagttttttcatctttgtgcaattcatgtcgattctattatttattaaaatttaaaagccaccgcaaatcatcgaatgattcacagtggcaaagttgataaaaatagaaaagaaatgagtactcaaatcattcaaaatactccaattccttaaaatgatacaaaataaagagttcaaaaatcactcaataggtttaaaaataatccattaccagaaatttccagctgttttttatctgctatatcaggttttgtatctattttcctgacactaccatcctgacatattgtggaggtaaataattatatatagagccattttcaaaagaggcagtttctaaggtgggggttctaaagtttatagtttcagcatggtatcctttaggaacaatcaattttaaatacaaaccagatatgtatccatttttcacacccttctctcttctatcatagaaatcacacataattagcttcacttttgtctgggacaagtccaatacttgcaatgtacaatttaaaatattcaacgaatacaagttgacatttgaatgcaaatcaagctgagatatagcattactactacaatccaaaacctccaaatatatatttgcactaagatcaattgtttttagtctgttatcagcacaatttaattcttttaaataagggtagtcactaaaaaccggaattgcttcttctgatatttctttaatagaaagtttacgcagcgaaactccttccacattctctttttgctcagggagtatcaatttcttcaataaacgataatcattcccttcttggcgtatccactcatatccctgcaatccgcaagttaaaaattccatctttaggttagcactaaaatccaactctccaatataatttgcttcacaatttagttcccgcaattcttgattatgtgatgtttcaagtgcttttagcttattccaactacaatttatttttctaagatgcggtgatcgactaatatccaatttctccagattattatccgaacattcaagtatacttattccttctgtattcgatcggttatccggaagaatcaacttagataatatcccggcacgacctccttccgaaagtaatcctttatttctttgagatttaacaataaccgttcgaagttgtttattatgactaagatccaattctatcagtcggttataagtacaatctaaagttcttaattgaatattctttttcaagtctatcgtattcaaatcacaacttctacaacttaaattcgtgagatttttacaaccacttatatccagtttcggaaggtagacttgtgtaatttccaactcacgaagttctttaaatctagaaaaatcaggaatacactccaatgtatcagtccgatttcccaccaactttaaccgacgtagagaagaaaaatactcaaggccttttaatgaggtaatttcatgtctcgtagttttcgctctattcacgtcattattaatccataaactggttttcagctccaaatcctccacgtaatcaatatccgataataaaatagagctggtatcagctataatcttcatttgaaacaacgctgctttaagcatcggatcaaatttttctgccacattcttattatcagaagagttcaatatgtctgcccgactagtcacacccatcaataataaacttactattaaaataatgtttttcattttctattaaattttatgttgtccataatcaaacatctctctacttcacctttttacatgagatgaattatcattcgcaagataagaagaaaaaacgaaaaagagaaggaaagagtgtccccaaaaaggatacaattttcattcctcctttttcctcccttcacccttcacaactccctctggcacgacgattgcgggtgaaggtctcctgttcaccatccgcttcacctcccatcagacggagactacccgatacacattcccaaacttggtatgcttacgttctatccccactgctatcagtatttgtgccaaactcgccggatttgccccacgcatagctgccggatttatcttcttcaatcgctgaaagatatcagcagacgaaagaagttcacacccttctcctttttctgccgcccgataacaggaacgcaatacgtcttccacaggtccctgacgatagaacatcatgttactttgctgcaattccgtctcttcctcttttgtaaaccaataatgttcacccgccaaaatctccgctttcaattgagcataaagttgtgcatagtcaatcccctcacaatcgataggatactctaccagcacacaaataaacctgcggctaccagtcgggtcagtcaataaatcttttcgattcgatgtcccgataaaagatgctatacgaggtagcgagcgataatttttctgataagctttgcacaggcttaatgaagccatctgcatcagattcttcaataacggcattttcgtcggagcatatttatcaaactcatccagattgagaagtcccatctccgccaatctccgttctatatgcccttgactggttaaatccaccttatccatataataacgctgaagcgcaggaggaagtagcgatttgcaaaaagtagactttaaatatccttgctccgtactgataagcaaaggcgccacactattggcatgacttcccgtaacccccatccattgtgctgtcataccccgcatccatatatggaattctttcacccacaattggtctctcgaaactctgcgtgccaaagccgccaagcgatccactccatcccataccggcaattcttccaaataaagtttgaaaggatgatactctgcaatacgggtggagaaaatacagcgtgaaagatcacgatcccaacaagaaatacctgattcgtgagcttccaggcagaatgtatttaagacacgctgactcacaggtgcaaatccttcctccattcgttccaacaaacgatattccgtttcctctgtcagcacattgtagcggaaatcatagcgggattttaaaaaagtatctacgctctcagttagtgacttcactttcgatgagtctttttctttagacgatgatacccccttaatcgactgaataatagtattgacaggtgctacactttttgtatcccctactcccgtttcatcttgttttgaaagacacttcatcaatttttgccaaaaggcaaaccaaccatttttttgttccattttcttcttttttttatgattaatggatgcgaatataatatcaaaaaaaagccatttgcaactttttatcctattcattttatgaaaaccagacttatcattaatatcctatcatttcttgtttatcatactattaaaccttatctttgtcaccgacaaattatatttatcactaatatgataagatgttatcactactatgataaagtaacatcattattgtgataagatcttatcatagtaatgataagtataaaatatcagcactaaaaacaagaaatcatttaaagataaagcagaaatggcagtacaatttgaattatataagactccgatgccaaaggagaaaaagaacaagacgcgttatcatgcccgtccggtaagttttgagaccgtcaataccgagaaactggcttatcgcatccatgatcgctccacattaagagtatcggacattatttcaaccttggaagaactgaaaaatgaagtagctcagtgcctcctggaaggtaaaaaggtgcatgtcgatggattaggattctttcaggtcactctttcctgcgaagaagaaatacgtaacccgaaagacaaacgtgtgcaccgggtaaaattgaaagctataaagtttaaagctgataaagaattgaaaggggaattgtgtcacatgaaattccagcgttctaaaatcagaccgcactccgccaatttatcagaagtagaaatagacatgaaactaactgaatattttgctgaaaatcagattatcacccggaaagattttcaatatctctgcggaatgacgcaaatcactgcatatcgccatatcaagaggttaatggcagaaaagaaattgcaaaataaagggacgatctatcaaccgatatatactccggttccgggtaattacagggtatcggtggatttaaaatataaagaacaatgaaagagccatgaaacaggtagcccttcacccgctcttccccatttgataagggatgtagagagaaggtgaagggctgataaattatacagaactattccgtattaactatggtttcaaataattttccaaaggttccatagacaattcatcttgatttgctccccaacaataataaggctttttatccttaaagaaacatatatgaggataagtattttctcgagttaaaataaaaaatgtcccatcatcagaatgctctctagcatattcaaacttctttgtttcatttttctgcggtgtaaacgacataatttcccatctttccgcttctgtcctctttatactactttctaccatcttgtccgcagcttccttcccaaacacttcaacatatccttgataataacttttcggattcgtgtctttcataaagttttcagcatgatatatagcataaaaatatattgtttccccattatcattctgcccataaaaacaagcaaacttttctggaattctaaataccttttctgaatcgttcactaaatataatcttgaaggcgaatcaataaccggtacaaactttatagtggacttcatcaaagttaaggacaaggatgaatcattccatctccctgcaatattcatgtttaatcgttcaagtatggtatcctgaacatttttattaatctcctctacaagcagtttgttttgaggtgtaagttgactgatagcctgagtaatcatcttatctctttttataacttgcttggaagtgccatcaacatacacttgttcgctacatgaaagtaatagtatctggacaagaaataggattgataatttaattgttttcataatatttcttacagatgtcttttatgattgataaaaaactataattacaactttattaattgagtgagaagagtaccgacataaatatttaatcgatactcctccattaattccagcatcaaacaaagttttcttttttcgtcaaattattccgtatccacctcttcgcgccattcttctgaaagcgcatagttattgataaacacgtatccatctaatgtggatggcaccgagatgcctaaccaatagagaatttgcggtactatcagcgtattctcaacacagattctttcagcattgacattggtaggcaatgtatttgcaaacatggcagaagctttctgttcgatatccggagaactgcttgttttatctttaatataatacatattgagtccaccttgtatctgatttttaattactaatgtatcctcctctaatttctcaagttgctctgttggcttgaatttccaatagccgagcatatcactagaaggttcaatatcaatttctcccgatagttgcaaaaattctctttcagcaagatcctttttccatagacgtacttccgatatataataggaagttggcacagaataaccacctatcgccaaaaggcttgaatccggagccaatccttgggtatccgtagttccagatccctgcaacttaccatctaaagtaatgagccaatttctccttccggaggcagcggaacttatgctaacaccatagtgatgccatttagaatcattgtatccggtaatagcttgctcaaaagcaggaccttccttaggatttgttctcatggatacagttcctctctgcctatatagtccccagccggcttttccaagtatgcgatcccaattgttaccattatatgtaccgtcctgcctaggaaccatacgcattatgatctccattgaaaatgcatccatacctaaagaataatatttacctatactatcaaaaacgacagccttgtattcattctgagaatcaaaatatgcaccgtatagtctattaccattcaattgtttttccgtataatgattgtagtaaaacagaccaaacgtgttacgctccacttccgaagtgccaccataacgaccatcagccgatccaccgtgattggaagttacaacaataagccagtcttcgtaaaatgcattctcacgggcatcaatcgccgacaaaaattcaccaatgtatccgtctatagttttaagtgcactgacataagcggcgttgtccgctttgaatcccccactcttcccagcctccaacattcctgaaaaatcggccagaatgaatgtgtaatcttcattcgcaatatgattgagaaccacatcccgagtttgaacgtcattttctgaagtaatggtagtcttagcattgttaagcatatttttgttcagtttcgcccaaggtgtcacacacaatgaaagcatattcacgtcattattcgaaatatagctaataatgttttgatagtgaattaccttttcattcggattgttcggattgtactccacattagcagtataagattcatcggttatactgtgcttttcgggtatgaccccagtgagcatggttgcccacgttacagggtcttcgttcctctcgacagacagggttcgattgtcactaactcctgtccacgaatatttactatttttcaacatcttagcaatggcaccatcggcaggaagggagttcttcaccacttcaccaaccgcaccatctatatttatccataatactttacgatggattttggtagatatgccggtatctatagttccatcgtctgctatttcagcaggtgtatcgtattccgtgcaagcatagttaaatgccaggacacaaacaacaagcaagctgtatgtgagaatatttaaaagtttattcatctgatataaatttacggtttataataaaatgtaccaaactcggtaaacgactgtactctgaacctaaaacgagacatatctgtttcattccagttatcattacgattaggttcaggaagttttatacgcagatatctcacttgttcttttgacggaaaatcatagaaaccctcacttttaatattgggcaactcgggatgtgcaatggaatcaatctgcacaatttccctccaaactatattttcgtcaagcggatcattaataatatcctgattgacaggagtctcgataatcagcttagttgccgcaaagtctgagttgttgccagccagaaatacaccattaacatctgtcgtctctttcatatcaataaacaaataatacggaagtggcggagtacttgtatcgttgttgtaatatgaagtccatcctgttgatttgtcgctgtccagcaatcggtccggcgactgccctgaattaaagttatcgcttccatttgcatccagtgcataaatctcccagtcagcgcgattatgacggtagtgatacccgttacttgggaaatcaaccacaccacttgatggattttctgccagaggcgagtatttccatatggctttatccatcagcggatatttcgatgcataactacgggcttcgtctgtcagcgaatagccccaatgctcaaagaatggtgaaaaatcttccttaaaatagtcacataaagccttaaagaaataggtagaagtagaatgatctacggaaattttatctttaatcatacggttcaactctatataaaaagcccaatcgtcatctttgtagttagctaattgaacgaggcttgccaatgcgtatgtcggccgtacttccgactttatatcagatacaaaccagcggctactatcggtatctgcatatgccaatgctttggggaattgctccgcaatgctactgccttcttccgggaaaatcggtcccatcggatacccatcctctcttaatcctttctcagccatgcgatataggggaattgcttttaccgcatcagatacttcgctccaccagggtgattttatatctctgaaagagtaatttctatataacgcattaaaaatagcaacagaattaccggatttcaacgtttgatagctagccagctcattcaacagataatttgtattcaatgccactacaccataatcggcattacgaatatacagattgtccaacaactccacatccagcaccacacgctcaggaaaatcgggagcacgcattgaaaaatcctgtgccccaacctgcaaactgtaatagttataataataggtctcgacagcattgtcccatgcttccagtgtgttcggcatcttttcagcaatggtaggatcatcatttatcatatccaataatcgctcacgctgaacggaaaaagcgacatgccggccacgcaactcgagccacggtacagtcgttgtacgcaactgctcaacccacgctgttacatcagtagaaccgacaataaaatcaggcgaacgataagccccgttaatctccataacaaaatccgcactgccattcacatccttgcttttttcgatccatatcatacctcccaaaggattacgaatcgtgttttttcccgggaacagttgcttcgaagtagtaactaccggcaaacgcaagtagggagaaatatccgtcaaatcatctaaatgagaaccgatgataaccgtcaaccccatagtgttgtcattaatggttatagtaatcaattcacctgctccggcataaagcccggtgctgtatatcggacgaggaacttgttgcacgtcaagatcgtatgcaggaatgtatctcttgcttaaatcaagcgcaagcagtgtattgacagtattatcgactaaagtatctaccaaacctggaaaaatacgggcactttcatacatactgacatcgattccttcacctgttactatggttacattggtagaatcggcggtatcatcctctgtcccgctttcgatatcatattgataagcaatgttgcagcttcccataaaaaacatacaggaaatgaatgacagcaaaactgcatagtcggcttttagtttattaaagcatttcatattgcattctaatttaattatttaaagaaacgtaatctaatgcccagccttcaccatcgaaattccaggaagaatcaaccggctctccaaaccattgaaaaatctgataggataaatcgactgtattaagaaccgttttatagtaggaatcgtctataagtgggcataccttatccgttacaatactctcctgcctgcgcgttacgtaatcatcggtaggcgcaaacgtaccaaccggtttattgaagtataatcttttatcttttgatgtatatttcgaataatcttccaaataagataatccgatatcatcttcgcgatcgttggggtaataacccaccagattattccaatacggatataattcacccaaaaggtccagttttgtagtacaatgatactccgcaataatatcagcaggtagagcaacgttgtaaaactggagatcgtttatatatagatttgcctgactaggtctgtccggagaaaacgtatgtccgatggcaagaggcgcatctgtccacatatctttactgccgtctatcttacatcccatctgatacttaccgtcaagataaaataagatggagtcacctttctgggtatcatcaacctcttttataactagcgtataagaatgccatgatccgtcacgtctcgtagatggtaagcggaaaaccgaagaaccctctttaaaattagcagcaaattcgacttgcgtattattagaaaacattagctgccaacctgtacctgctttttggtatcttttcgatattatatttctattaccccaagggtcgccgtgcttatcaaacattttaaactgaatggtatatccacttttatccacctcttcatccggattggaactccatcgtttacccatattaaaaaactcggtatttccagtcataacggcatttgttgtcgctttttgtccgggaccgacgaaataaggactatagaatttgtattgtagttcatccgagcccggcctttgcaacaatttggatgcaaaccgactgttatagagcatcatgaaagaattgagacgcggatcatcatacaacgatgccggagttacattaccttcataaacaccaccataagaagatgtaataactacaagccagttttcctgaacgtaacgcggacgcgcttcaagtgctttcattattttaccgatgaaagcatctacattgtaaatcgcatcaataacctcactggtaggagttgtctcattgctccagaatccatgttgctcaccagtctgttgaacaccgccgaactgtgcaactacgatatccgagattgtttcaccattgatttcagcaataagagcatcagcggtttcactgtcggccgaagtctttcttttagtatcggcaacactcccgaaagctccgaaaaactccgtatcggaagaataaaagctaacttttagattttcatccgcctctttcaatcgttgaagaaaagaaggcgtttcgagttcgtcaattccttgattgacatcaagcccgttctttgttgttccggtcagcaaatttgcccatccacgttctttacttaccccttcttcattgtcggcaagtccgtaaaaagtaaacaaagatttatccgtcatggagcggataactggagcctttcgtgtattgtacgcctcattaacggctattccggatgcaccatcgataaccaccatcaatacgtgtcccgtagtatattcagtacccgactccggataatcatcagtcaaaagcctttccatatcctcattgcacgagaatgcaaatacagcaaacaggcaaagcattatattttttatcaacttttccattgtatttcataataagttattcataatcaacttctatcatcatcgcattgcgaaccatattaccatcaaaacgactgaaatcaccaagcagcagcaatccgtttgaattggtcgaagtacgagtttcaattactttgtagagttcaccctggaagatgcccggcacattaaattgttgcagcgcctttccatcacgacccaatataaggaaaccacggcgagttacaccatcgtatttcgtaaacgcacctgaaacaacaatattatcattatcaagcagacaggcaaaattggccaatcctccttccatttttccgatcttgaaaatttcatcacgtgtgccatcatcattcaacataactacactctgtgcaggaataccgttgaactcagaaaactccccagttataaggattttctttttgtttttattgtaccggattttagtaatacttccatttgcgcccgtaccgatgtttctcataaaagtttcatcaagggtaccttcggcattcaacttcacaatattcttcacagactgtccatcgaaactgctgaatgtccctactatgacaataccgtcactttcgaccatacaagcatctaaaatctgcccgataactccttctgcatccctgcgatagctatcatcaagttctccagtccttgacatacgcaatacactcgcaaccttcgaataatccaaaaccatactctcagcataggatttttcggtattaatacgacagtagtttgtaatatttcctactgctaccaccttctcattggaagttataaatgtacggacaggcgcttcaagagttcccccgttgaataccggtatcttacaatttatgcttgtattattctttttcgaaggcagcgctacagttttataatacgaggctacttcattagtagctatcgtgatgttattgaccggcaacttatcccagccgtattctgaaaatttacccgacagaagaaccctgtggtcactaggaaaataagtaaatgaattaaggtaacattcaatatctgtcactcccggattggccagatcaatgccggctccctgaccaggatcaagtttgaagtcagttacccattttcccgatacagagccgtctgtcaaaaccatagatatacaagaaaacctctgcgagctattttcattgtagtaggcctgcatatagtcgccaacaggataatatacccgtgcttttgaataatgttccgcacaatcgtaaataggtcccgaagtgcctttaaagccgtatgactgatctatcttaatatttcctaatacagtgagacgaggtccatagaaaacctgttctttcaatacaatataagccgtacccgaactaagatttccaggtactttcacggtgattgtcgtgtcggtagcagttacaattttagtttcttcatcagaaatatagaacttgaaatcgtaacgtcctgattgcggatcacaccagttcaacatcccttttgctttgaatacaaccgtatcattgggataagcgctttccggagaaggagattcagccagcaaaccgattccaagcggagcttttcctccactgtacggatcatctttaatattgctgttcagatcactgttacaggatgttaccaataacgaagtgaatacggagcaaacaatcattaacgaatagatggtaatatgtttcattgtactatctttatttatagttaattatccggttctgtttctattgtcgcatttatagctttggtagcgaaaagatatggttcaaaaccaaatgcatgatcggttaatctgagtacatgtaccactccgttagtcggttgtatatcagatgttgctacataagcgtttttcatatctcctatagtgaaatcatagacataagagtatatgatttgtcttgcaccggcatatttcacattgtttgcatcataataaacaacacccatgttcataggctgctgaccataagataaaaatgcctgtcccggataggctgctatggcagtcgtatcaatttgaggtatatctttcagcaaatatttatcttttacaatgtacattgacagcatttcacgccagacttccggttttatctgactaaaactcttgatgctatcatgccccatacgataccaaatacggttcagataattaaaactaccacggattgaccaatcggtaggtgcaaaaaaggtaatttgttcgtcttcaaaaacatcttccataccggacagccggatgacttccaccaaatctttaaaataatcgggtcttgattgcaaatattgcatcatattcccattataataagggttcgcttttccaccatcaattaaataactatcatcggcacaattgtacatgagtactgccaaaaggcaacatccgacaattttcttccataatttgatattatttttcatatctatacattttaagtttatcagagttactcccaaaataaattcaatccaatctgtgtgttgtttttcaacgcattacgatgaataggccatgtccatgcccccacattgaaattagtacgcgtcatcggattcatacaatagtttctgttatacacctttcctgtacgaaccaaatcataatagtaatgtccttcaccgataagctctctgcagcgttcccagaaaatagcatccatcagttcactacccgaggtatttatttcggaagcatgtgccctattgcggacccgattgagtaattcgcaggctttcgtatcgttagtccccaaagcggcaagagcttcagcatacaacaaaagtgcacctgcataacggaatactatttgattgccggagttggacgtaattgttccgtttccataagtatcaatattccaaaatttcttgatttccttaggagcagaacttgaaaccgaagtagaatatatcttttcgtcaaaccataattcttttctcgcatcatcttcatacatagggaacagactcattagataatctcctgaataacagaacactggtgtatacttgttcagacaggaataggaaacattatcagaaaactttgcattcatcataaatatctcattgaaatttatattttgtgcaatctcaaacaagccttcgtctgaccctcctgcgaaaatcacggaacttctatttatatcaagtaatgaataagctccattgttacgttccagttcctcgcctagcgaaacaacattcctataatattgctctttattttgtgcatcaaactgtacaagccacaagtttatatgcatcatcagcgcaatgacagaacctctggaggctctaatccctttgctcgaataagatgaatatgaccatggtagtacttccgctcccggatcatcgtcaagcaaaggttgtaagtcagcaaggcaattttgcaaaactataaccatattggttcttggcaagggagcttcattataggcatttgtataataaggcacatctccaaaagcccttacgatgaagaaataagacaagttacgcatgaaaatagcttctgccttaaaacgactccgtttcaatccatccataccgggcactttgtctatctcagcaagcagaatattggcatcctgaatagcagtataaaacacatcccattgcattattaaaccgcccctagcatcatcgggatatgtattacgcaattcacccatatcgttgttagccagataagctacatatttatccccagtgctgtaggctgttattggagcgcaccgcatatctccgctatacgtaaggaaaggacgttgtgacattgttgcattccgaaacgaattgtatatgctcaacaaaaaagcttccgcattcgtctcatttccctgcgcccaaaaatcatcacccgataatttatcttcactcttatttgcaagcgaatcacaaccggcaaacaggcaagatactatcaaagtcattattaaaactatatttttcatattcttctatatttaatcgttcatctaaaaatccattgagacaccaaatgtcacagtacgaccattgggataaccaccggatgtgtcatatcccaaattgtttacattttcgggattgatgcctgaatatttggagaaagtataaatattgttcatactaaaattaagctgacatcggctgatcctaaaaaaatccagcattttctttggaatagtataagccacagatataccgttaattttaaaataagagccatcttccataaacaatgtctggtcgtatctgaaaggctgaataatacttgaacgggtataatcaaacggattaggatattgggcatagatattatcttctgtccagaaattatatgcctcaataggtgttaaagctccactacctgtaaggttcaccttacctgctacaggtgttccataagccctaaaacggtctgccagagccttgttgataatatcacgtctcaacgtaaacgagcagttagtgttgatagaaaacgctttataacgaagattgatactaataccaccggtcattcgcggctgtgaattacctacaatcaccttgtctttttcatcgatgatataatcaccatttacatccacccaaatagggtctcccgccttaaagtatgcttgagtagaagtattccctcccatccgcaagcgttctccggtcagcggattaacaggcacgtcttcgtcagtcgcatatacgcctttatacacatagagataattccccatcgcgttagaacctaatttattcaccacttccgcatcactgttaataatctgccgcacctcgttaggcagctttgcgatcacgtctttattaattgccagtgaagtcgctacattcaaatcccaattactttgccttgacaacggacggacgttcaacgaaaactccaatccatagttaaccaaactcgttttcgtacttcttacggaattaaaagcattgtggttagccaactctatcgaacttagctgattgtcaatttgtttgtaatacgcctcggcaacgaacataattttattattaaggaatgataagtctgttccgagattccatgatgttgacgttaccggcttcaaatccggattcggcatagcgtttttatcaataggaataatagaaactccattataagtatctttgctcagattgtaacttccccatatatcataaatactagctttataagtggtactacgtccccaagttacacgaagagctccggcatccagaaacttccattttttagcaaaagattcacggctgaagttccagcgaaatcctaatgaaggatttattgcccatttcgcctgcgacccataagatgaatttatttcaggacgaatattgggagtaaatacgtatttcccaccaggcagcgataactgaggatctataataagtgcaaacgtattctttttatctgaaaaattcgaccttccagctgccatggacggcataccggacgaccatatatggtcacttgccaatccattcagcataataaagttaccgctatacttttcggatgaaagttcaaaacctccctgtaaatcaaaatttacaattcccaattttacggttcttgacaataatgaacgaacatacatattataactatattcactaccgttattccaagtagccctattggcattcaaaatacccggcgtaaatttctcattctccacagttccgtatttatatcctaaagtacttctccatcttatatcaaatggcaacagatacatgatattcatacttgcatcatagactacattctgattatctgcctggacagaaaaaacagacaatgcagaattggaagctgtatacatagacggtggaggcaacaaggaagaagctgccgaacctgcggctacgccggattgtgagaaagcatttccgctaccattactatttcgggttaatgtagtggcaagatttagatccaaatgaaatctatcattaggcttatatcctactgctgccctgataccgtatcggttaaagtccgtgtttttcacaattcctttttccgtataatagtttgcattgatcttatagtcaaatttctcattaggtttaccagagaaactaagattatgagtttgattgtaagtcgtctgataaaagacaccctgccaatccgtattattattgtaataaggattcaagctatctgacagtgcctgcaatttatggatttcattatatccatgataggcggatgtatcatttcccaaaatttgcataattctgagcgctctctccgccccgcctgcaagtacatctctcaacctcggtggtgttttcactacaaagttagccgaataagaaactttcggtttggctgtttctcctcttttagtttctataagaattactccataagcaccttttgaaccatacagggaagttgcagctgcatctttcaatacttggatattcgcaatatcttcaagtggaatcatagccaacggactgactgttgcacctgacagcaaaccagctgcatcatagcccgttacgtcttcctgcggtataccgtcaactacaaacaaaggaggagtcagccccatcataaactcgccatcaccggaagattgaacggaaatatccgagactcctcgaattgaaaaacttggaagacctccgggagtaccattattcatctgaatatttaatccgggaacacgcccttgaagcaactccatcggattagcaacaggagtattgaccagatcttctgctttaataaccgtaaccgatgctgttaccgcagccttgctaactcttttaaatccgactacaactgtttcatcaagcatattctctgtcggactcagatatatttgcatgcgttctgaaggtttagtaactttgactgaaagactgtcgaacgccaggaaagagaatacaagtcggtaaccactcttaacttttgtagagaatcgtccgttatcatcagttgtggttgaaagctgaggcacagtttttccactttcatttttaacaataacagaagcataaggcaatgtagaattattgcttttatctttgactacaccactgacaggaatatcctgagcccgaacaccaaccgaggtgacggcaatcgccatagccaacaagccatatttaaatatatttctcatattagaatcatggtattaattagttattttccatcttcaaacaagggggctcctgctgtaaatacaactattatctcccaatgagcttccttgtatatcgcaaattcaaatgacatagtggatgtcatacgataaccacttgctgtaatacggtcatataaaaaattgacatttattctattaccatctttattggtatattttgatttcatttcaaccaatggcatcggataaactacatcgtactttacatattcatctgttttctccatgttgaaaccatgaatcagattagcccagtctgtctgattaaaagatgaaggagagatcggtgtataatccggtccataaaaacgaaaagtcaaactttttacatcatcatcattatcttggttctcacgaaaataaatatgtacatcttcaggaaacatatagtctccactttctgtttgaaaaagggttaacgaatttggtgtaacatagtcctgtccctgcaccaaccctgtttccggatcgtatatactcggttcgtaatcactttctctgacaggtataagctgcatatcagtaaatgttttatatcctcccgagtttttcaccagcacatcaaaaatatagccatcactcggagcacactgcacaaaagaagattcggcattggaccacatcataaattctccggaatgctttttaacctgaaaaagagtacgatattctatttctcttttagcttctatttcttctatagacttttcggtacccatatatggagttttccaaacttttaccgggaaatattccgtcaattcaggtgcaggacttccgtcggccctcacgattcgtgatatttcgaaagtaagaggaagcgttgaattacccgatgaaaagttgtcggacatcaaagtattttttcctagttgaggacgatatagttttgtagtaaaattgacgtctctgtcgaaagcatccaaactatccggcaaatatttatcgacacacgatatgcttaataatacgcaggaaaacagcagcgcaatatttttacttcttatattcattgccataattattaaatacgtaaataaattcatcaaaaccgaaactgtgttggggagaaaggatgtgaatgataccattatttgtataaacatcattccataccgtagaaactctgttccagttatcttttacctgagagtttttcatatcactgaaaataagctgtttgactcctctgcctacaaatccggatgccggtttgcgagaacattctatattcatttgataattgtacttcaaagaatttaaggagttatttccttcattggctagaatattatcggtatcgtaactacctttaataatgtacttgcataacattcgctcaagatcagctctataatcataatgatattcgttaatgatcgtatcatttaaagtcggtgttataacattaacgatcgtatctttaacaacaaacggttcaattaataaatcactcaaataaatcgcttcacccaactccttttgtttacggtactcgttaagttgcgccaatgaggaacggatacatgcatccggtatggcaaaaactgtatattgcacatccgtctgttccatctgttgtatgaaatcgggaatattgttgacaagaaccatcatagaatcaaatttcaaattcagcctttcattccctgtggacaaataatccagaaccgttccattaaatacttcggtttcattttcctcaggatatgaagccacttcgtaatctgtacaagacagcatccaaagggaagccgaagtcagacataaaataaatagtatcttattcattgtcgttttctttttatttccaaaactcattttgttcaatctgtgaattagcagtaatgatatcttccgataccggccagtagattccaccactgctgatcagtcgcaagaatgcctcattatctttcatcagcttttgccgacggacaaggtcataccacctccagccttctcccataagctctctgcgacgctcttcaaatatctcggcaattaagctttcgcgattattcccaaaatcctttttaaaagatacttctctcaatccacgatttgttcggatcatattcaggtaggatacagcttctgtgcttctatttagtgcgcataatgcttcagcccgtagcaaggtgatatcttcaaggcgagtgaaaacaatagacgagccaaagactccgaaatcattgtctttcgccgatccatcctgaataatctttattttactgaacaccggagtttcttcattcaaattctgaacataataggatgaatatttgatggtatctatgattccaaaccgcaagtcatcaaaattggtaaaaatcgaaaataagctgtcctttgaaatgtatatttcaggataggatttttgtaccaatggataagctaaagtcaactgttcaagatgtccgctttgagttgcttcgttatcattgtgagcaaaattaaatcctaaaatccttgaaccttttacactcgcattcgagtaaaacagccctgtttctgaagtcaagtcggcaatagaagtatattttgcattaatctcagatgcatgatctattataaatgcagaatatgtctcggcttctgcataatttccctgccaagcacagatgtgagctaatacagagtatgcagataacttattgaacagttttccctgccattgggccccatatgaaccataatataaattcgtttgagtaccatattgatagggtaaatcctttatagctgtcaacagttctgccttagcataactcagcaccgtttgagcgtctgtacggggcatagacggaaaagttccgttatcataagaataggtgactaacggcacatctccccagattcttaccatataaaaataagcaaatgccctcaaagcgcgtacttgagcaatgtcatatttcaagttttgttcagaatacgaccggtcaagttcgacagttcgtggagctttttccataaaaacagatgccgcattgattaccgcataaaatcttctccagttagatactttcttcaacaagtcatatggcttgttcaattcattatcagacacagcttgtaagtcactacgcttataaacggtaaaatcccccttccgcaaatcaccacatatccaatgagtattgttatcggctaaggctgcgcgtgtcaagccatatactcccattaatgctgatcgagtatcttcaagggtcttccattgttgggtttccgaagctgcatgtttgggatctacatccagaaagtcattgcaggactgcagaaataaacaggcaagtgcggagaaaagagctaatcgcaattttttcatattgtttttcatattgtttttcattttttatcatctccgatatttttagaacttaaatctcagtcccaaagaaatggaacgaggaatgggaagcgaatacccgtcataggtaccattgaagttaactaactccggatcacctgctgaaaaattactgaaagataacagattagatcctgtcagatagaaatacaaacttttaggtatattactaccaactttctttataggaagtgtgtaaccaacagttatatttctcagtttcaggtatgacagcttttcaaggaacaaatcctgttctgcacggtaaggatgaacactgctttgcggattgtatataggataattgtcacgctgattagtgttttgccaaaagaaaatctctttaacagactgcaaggactgaatattatccaaagtcgcaaagtcgtaacgttgctgatcgcgcagatttaaagcactatgccccaaagcaaagaagagattgaagctgaaatcgaatcttttataagcaaactggttagtcaatcctcctgtatagggtggaatggcatgcccggtcagcacacggtcattgtcgttaatctgattatttccgtcaacgtctgtccaaacaggatctcctgctttaaaaggaactccatttatgttcagtggtttcccattcataacaggaacttctgagtcgtttgtataaatgcctttattttgatacacccaaaaggcatcaactgactgtcctacttgtagtttatggtcgcctatcacagttgtcttctggttttcgggaagtttctctagtttgttcttattataacttgcgttgaaagacaaatcccacttcaacggagtgttcttcaaaatggatgccgaaagatttaattccaatccctgattactgatatccattccactggccagtttatactcatatcccatttcttgagtgacaggcaaatatgtcaataagttcttttcataattcttatacagacttatttccgcaataatgcgattgtcgaaaaaagaacctttcaaagcaagctccattttatcagaatagggaagctttaaatcataaccaacccaacccgatgcatacggacgagtgattgttgcaaatccattagctgaggaaagtaacggttcgccactccatgtgatacttgtagccaagtattgaggacctaattcatatctatcggactggaatgatttggctattcgtgcataagatgcacgcaaagacaatccagacaatgcagtactacctgtaaaaaattgattctttaaattccattcagcagaggcagcgggtgtaaacatccatctgtgatccgactggatagcggaatttccgtcgtatcttgccaataatcccacattaagcaaattcttatacttataatctaaagctattgaagtcgatacccatctattctccaaacgatcaacataacgatactgcttgaagttcccggtacttgttgtcggcttcatatcatcatcaccatcataggcacgagtataattatagtgatacaaatcgctggttatagagccattccactgaacattcaacttatgaatatcagctaaaggcaacaaatagctcgctgaagtttcacctataatccgttgattgtatcctgaatagttagagacaaagttgacggactccaacaaagccataggccaaaaagcacgacgaacatttgttgtataatcaagtttgatgctggctgtagcattgaatctttgcttagtatagctcaaagccaacaatccattcagtaaattgttataattatcatctttagtcaaatcattggatattaaaaagtcattatacaaattgccggcaggtgcaagcggagttgaaaaatcaaccatatactccatctcagcaaacctgtctctaaaattccgattcctgacacggtctatcttagcggcattaataattgtactaacattcaagccatccaaaggaaccatattcaaggcaaagccaatattatatttcgtataagaggtattgtccgctgctcccgcatcttttgtcgttgcgagtgtaaatacataattcgctttctttgaaccaccaccgatagaagcatttacattatataagagtgatgactgataataatcgtctgcccagtccggtttaccaaaataacgtacatctcttgtatccataagataatcgggttgtttacccggtgtaagagaatacgtatcatagaaacgttgacggaatgctttttcgtatgatccattcgtcatacgaaccgaagacggagcaaaggccattcctgccgaaaccccgatagaaacgttttcaccgccataataaccgtctttggttgttatccagatggcaccattagcagctaaaggacctaatttggcaagctgaagcggatctttgataatttcgattgactctatggaagatatatccaatcccgccagcatgttggcagcggctcctatcggattaatatcaaactgcttgatatcgtacacatagctattttccagcatcaatggaacgccattcaaataaactgtcggctgaacaccggacacatctttattagaaaagacaggtgaagataagccacgaaccagcatgctttgaatggtaccaggctcaccattattttcctgtacatatacaccgggcacattccctttcagtaattgctgaatagataaaaattgagagcgctgcaacatcttgatatcaacagtatcactcaccccaaaggagtctatactacgattagtaacgaaacgagatcctacattcttctcaaaagagtcttttttcatataggtctccacagaatcaatattcacaggcgaacttgattgagacgctatcgctccactaaatcctaaaaagcccatgacagccagcaaacgacaaacaggcttctgcaaaaagaaattaggtaaaattatcaccatactattagatttataaagttatttagaccaaataagtattagttgtgcatcaaatgcatcacaaaagtgcgagttatccagtagaaagaagttctctaatcattcaaaaacttccaaaattggaccataatcgctattaactataacaggtctaaaaatcgttcaatataagttcaggaatcattcaaatgggatagatcattgatatatggaaaagtacgcatcttccattaagacgcgtacttgtgtattttaagttcatattatttttatcctaacaagatttttgatattcctttggagttacgccaaattcttctttaaaacaggttgcaaaatatttaggattagaaaatccgcattcataagctacctctgctacagatattgatttatccttcaataattgacttccgtgttttaatcttatatttcgaataaactcaatgggtgacagtcctgttgctaatttcattttcctataaagagaagacttagacacagctaatgcgtccgctaactgaaccacatcaaaatctccttccgacatatttgaatttataacagaaatcactttatccaaaaactctttatcaatagaagaaggttctaaagaatcaatattgacttctacattagaacgaaactcttcctgtttgtttttcttatgcattataaaattattaatacgagcctctaatatttttaattcaaatggcttggatatatatccatccgctcccgcattataacattcaatgcgatcttccacggtatttttagctgttaataatatgataggaatgtgactggtttccaaatttgactttaaagcgcgacaaaactctaaaccatccatttcaggcatcatcacatcacttataataatatctatttcattatcttttataacgttcagagcttctaatccatcttttgcaataagcacatgataatgcttggacagaattttctccatcaaaaacaacaattcttcattatcctccaccaataacaaatgaacgtcagctatctgcgcatcttcaccttcgccaacctttgaatcaattaattcttctttctctaaaataagatccgtatttatgccatttgccgaaatatgttctgatattaattcatcttcttgataactatctttattaatgggaagatctacagtaaaagtacttcccttacctaattcactttcaacattaatagtgccatgatgtaactccactaaatcctttgttaaggataacccgatcccattagattcactttcatctcctttatttattgtataaaatcttttgaaaacattctccaaatcagcaggagcaataccttctccggtatcaacgacctgtattcgcaaatgatgattttcagactcccaatatgaatctactattaattttatatttccaccattagctgtatatttgtaagcattagataataaattagatactatcttatctaatttatctctatcaaaataagccatcaaatgtctatcttcagtcaaaaatgtaaaggtttgatttttctttctcatcaatggagtaaagtgtatcttacaaacatcatctataaatgatatgacatcactttttgatacagataatttcatgttcccactttccaccttacggaaatctaaaatttgctgtaatagtctacgtaatttattcacattagaacgaatcatagttaactgcgaaatccgactaccattcgtcatttccgcatcatcaatcaaacaagtaataatagttaagggagttaataaatcgtgtgatatatttgtgaaataacgtaatttagtttgcaccaattcttctgacttctctttatctatctgagctattctcagttcatgccgcaactgaatacgacgcttcatcctatgatagaaaagatacagacataaaagtgtaaacacaatataaaataaataagcccacaatgtttcatagaaagctggctgtttaaacacctgaacttctgctatataattgctccataaaccatttacatcagttgtctttagataaaaagtacgtttacctttaggtaattgattgtaaaatgcaaattgacgatcgcctctgacatacacccaatcatcatcaactccatccattttatatgcatatttaattttgtcaggaaacgcataatttaaagaagaaaaatctatctcaatatttttatctcctgcatttaaagaaatgatctgacttcttaaattaaaacgttggttgtttttctccaaaagactagaaacaccatctatcttgacatctgacaccatcgttctaattctacgaggattatcagacaaatgatcataaggagtaaatactgagattcctttatttcctccatacagtattttcccagaacgagttttataataagaattaggcataaaagaatttaccatcacatcagtcattgtcgagtagtccatgataccaccatttttagggtcgtattcaattacccgtttattggtagaaatccaaatatgtcccaactgatctgttataatattaaaaataccttcttcaagcatatcaaacatatcggataagttttccactttatttgtttgagggtcataagtgaacacatctccatcctgactccccatccacaccaagccattatcatccacacagattgctccaatattatcacttattactccttctgcatgagttttcaaatttcttaaattcttttcttctaatgtcagatcagaggatattttagcattatacacaccttgctttcttgtactaatccataatgaaccatctttaccttctctaattcctattatatctacaaatggaaatttagtgtcttgaagtatcttttcctttgccggtttaaccaaaatacctttagttgttcccacccaaagattatgattactatcagtataaaataaacgcggaaatcctgaattatctacgtaatctgttaacttcaaagttcccaatagctctactccttttttatccttcttcaccttgtaaatttccggataatactcagaacccagccaaatctcattaagcaatggaacagaggtaatgcagcttacatttttcagattagcaatgttttttagagaagggatatctgtataaaagagaagtttattagaatctggattataaattcctattccccaacgattctgatctatccataaatctccttctttatcttcatatatattctttatatttgtaacaaaccccgtcttttcccgaataacaggaaaagagtaattctgcactaatggtttatttaaatcaatcattgatactccttcattaaaagcagcaatccataagttacctgacttatcttttactatttcactaaaaatattatttaacttagaagaaatatgagatatatcaacagtattaattatatttccaggacgtttttgaagtgcataaagtccctgtgtagatacaatccatatataaccatacttatcatcctgagttatgctaaaacaaccattcttatcccaatgttcattactttttatatctacatgactatacatcaaatcatctttctcctctggataaagtaaaaagattccgctttcccatgttaaaatccaatgttgcttcttattatcttgaaaaactttaaatggattatttaaatctccaatctgaggcatagcaataaatgaatctgtttttgaattatatcgatgtaatcccctttcccataaagttacccaaatattcttatctgcatcttcataaatagaattcacactagtaacaggcaaagtagaatcatatcttttgcaatatgagaaatcggcagaacaacgaaaaacagaagttaatgttccaacccatacccatccatcactatccactatcattgttcgaatctcttgatccttcaaatcattgtgtgtaactggtattatctgataagttcgtttatccagtatattaataccttttttagttcctataaatagatatccatttttattttccgcaatacaagtaatttcattattcgtcaaaagatccggtgatttcaatccagaacggaaaacaagtaatcgatagccatcataccgacacaaaccgtctttagttcctaaccacaaaaagccttcccggtcacaatgaacccgcaaaacagtacttgaaggcaaataattatttaacggaagcgtagataccgacatttgttgcgcaaaggcacacggaaataattgaataaaaaacagtactatataaaatttcagttgatgtttcatagtagaattaatataaagacgtatttcttgtgcaatattaaaataaagatagctatcactattcataaatcacttaaaatatattaatttaaaactaccacaaacatatgtggtctatttttaaacctttctgaatgatttttatcccactataatcagataacttaaaattatacgtatttgaatcattccagcacctatatataaatatgattcagcaattttgcaaacaggaaacaagctattgatatttcgaatcaattttggttatactattcagtaagcaagaaataaacacagattattagttcaatcataaataattaatttataaaacatttctgtatcatgaaaaaaaaatatgtgaagattatgtttttatcattgacattgctgacaattagcacaacagctacttatgcagttcaacccaaagatgataaaaaagaaaatgaagccttacaaacctcaacagaggaacatctaccattactaacgattaatggtacaaacgcatcatcatccttcattgtcaattccgaggctttactcgacaaagaaataacaattacagctccaaacggtttcaccgtaactccgactgttatagcagccaactctgggaaacaaaaagtgaaagtgaccttaaacagtactaaaagactgactgaagggaaaattattctgcgaagtggagatatccgttcatatataaaagtaaaaggatttggaactgcccttccagtgaaagacattgcagcatctcctgtttataagaaaggaaatgatacggaatttaccaaagcattcactccaaattcaaaaggatatactatcgaattcaaaataaaaacagatgactcggagaaaagcttttatccttattttgtaaacgaaaaaggttatggattcaaagcatatattacctctaatgaaatcggattattcaatgcctacaaaaaagaaattaccaatcctgcaacaaatggaaaagcaggaggaaaaggtaagttctataataatgatggacaagcacatatttatcgttttgccataacaccagataaccgtgccttcatttacagagatggaattcctgtagattccgttagaattatagactacgctccccagccaaactttgcagagaaagttggcaaaccagtagaaaatcttttaaagaacccaaacttcgaaggagaatttgatataaatccagaaacgaagttagttagtagagtggaaggatgggatgttgttattagcgaccgttggaattcagaacaacaaattcttcctgaagaaattgataataatcaggacctagacaatcatgtttttgaaattagaccctataaatgggcaactggttggagtgatggtatcctaatgcaagtagtagatgttgtaccgaatgaaagttacacactatctgctctattaaaaggaggaatagcaaaaaaagaaggaaaactcaccggtaaaatgattatagaagaagtgcaagaccctgaaaaaaaagtcatcacagaaattgccagtgacaactgggaaacttattcaatggactatactacttctgccgaatgtaaccaaattcgcgtatcctttacagtaggacgtggaggatggggaaatgatatcggagctgtccgtgtagacaacgctaaactgaccggcacatcacgtacatactcgcccaaattcggttttatagataatactgctgatgtggaatatttcacaattgacgaatctggagcctatgcccctgcacagcccgaaataactattaatattgaagactaaaataacaaaaacatgagaataactctatttatctgctttatgttctcattcacctctattttttcacaaaacacccagatcagtccgggtgttttgtggaatgacatagatggggagcaaattaacgcacacggtggatgtgtcgtttacgaaaaaggaacttattattggtttggagaagatcgtacaggttttaaatcaaatggggtaagctgttatcaatctaaagacttatacaactggaaacggctgggattgtcgatgaaaacgacaggtgaagccagagaagacatgaatgatatatcgcagggacgtttgttcgaacgtcccaaagtaatttataatccccaaactaagaaatgggtaatgtggagtcattgggaaagtggagatggatatggagctgcacgtgtttgtgtagcaacaagcgataaaataatggggccttatgtactttacaaaacatttcgccctaataaaaacgagtcccgtgatcagacgttattcgtagatacagacgggaaagcatatcatttctgttctacggatatgaataccaacatgaatattgcattacttagagacgattatctggagccgactccgacagaaactaaaattttaaagggacttaaatatgaggcacccgctatttttaaggttggggatatgtattttggattgttttccggttgcacaggctgggagcccaatcccgggaaaagtgcctacagtactgatatactggggaactggacaacagggaataattttgctgtagacaaactcaaacaagttacttacaactcccaaagctgttatgtatttaaagtggagggtaaagaaaaagcttatatatacatgggtgaccgttggaactctaaggatgtaggaaagtctcatcatgtgtggttgcccattagtatgcgctcaggctatcctgtcgtaaaatggtatgatcaatgggatttaaccgtgtttaatagtatgtatcgctataaaagagctgcagaaatcatacccggtaatatatactcattattagaaaagacctctgatcgtttagtgtctaaacctgccaatggtttcagtatagcggatgatgatgatgacatcaatctaagtctggagtttataaagactaatatacccaacgtatataaaataaaagataccaaaaccggaaagtttttggaatcactgttcggaactttacgcctgaattccgagaagaaagatgatgctcaatgctgggtattcaacctacaggaagatggttattatcagatacaaaatctgaaagataaaaagtatgttacagtttccggttcaaatacatttgccggaagtaatttatatcttactgaactatccaagaagttaatgcaagattttgcagtatatttcgattccaataaatataaatataaggaagcagatatattctctgatgcctacaaggctaataatctaaaacagatgaaagcccaataaatttctcatatgtaattctgataaattaaatttgttacattatgaacataaaaagtcaacaggcaaaaaatagttttttattcatatttatatatctatgtagtctgtctttgcaaccagctttcgcaactcaatcgaaagaagttataacaacagatatctgggcagccactgccactgtattcaaacttgtcggtgaaaaagctgtcaacaatgtaaaactgaattggatgcaacgagaggacgccgacctttataaaatctaccgggatggaaattgtattggagaagctaaaggaaatacatacgatgattataatctgaaagcagataaaacttttacctaccatgtagaagcatttaaagaggggaagaaaatagccacgtccgcttctcaacaagcaacaaccttcacccctaacggcgaaactaaagtttatgataatctaaacggaaaatatatcaccaaagaatctgcccaaaaacctcagggtatgaaaattggggagctttatttctcttataaaatggaaaacgttgaaaaggaagtagatggacaaacactcaaaggatggctagctacagaaagcttttctccgacagggctcaatggtagttggagtacttcccgtgaactggctttttacccaaatgtaaaatttgagggtattgctttccgatataacgcaaaaaccggtaaggtagtactttcagcacattatgaagatcaaagtggatatgttgcagctaaaatctatctggcacaaataactcccaaaggcgagctcgaagtaggcactatggaacgaccattgggctatgactctagagatcaatctcttttcattgatgatgacggtacagcttatctcctttcagctacaaatatgaacagagatataaacatctataagctagacccttcatggactaagcctgttttattagttaatacaatatgtaaaggactacatcgggaaactcctgcaatcatcaaaaaagacggagaatattatttcttcagttcaaaggcttccggatggtatccgagtcaaaccatgtatacatctgccgctgatttaggaggcgaatggacacctatgagagaaattggcaataattctacttttgatgcacagtttaacagaatcagtacagttggaaaaacctgcggagtatggagttaccactggggagcgcaacgaaaatataaaactccggctggcaatttcccgagaatttcaatagccgcatttaacaaaggatatgcttcgatggattattacagatacctggaatttagtgacaaatatggtattatccctgttcagaacggtaaaaacctgacattaaatgtaccggtgacagccgctgtcccaggagcgagaggaattaaagctgattgtatcacggatggagcttgtactgaatcttctacttatttccagaaaagttcaaatgctgctacaggttctccttatatgtttaccatagatatgcagaaagaagccgtgatttctgagattaatctttcgacaagattggttaacggttccgaggctgcctacaaatataccattgaaggaagccgggatggaaaaagttataaaatgctcgtagacggcaaattaaactggcaggtaggatttctaattctgaatattgaagatccgtcgctctacagatatttacggctccgcgtatacggtgttgtcaatgtacataaaaacaattctgcaatgtgggcagatggcatttatgaatttgctgcttacggaaaaccacaataaataagaaagcaaagtgtattagaaaaagccagttaactatttaaatgttgactggcttttcattttgcatcgatcacaaaaagttaccctattaagctttctgtatttaacgattccattattcgtttatatataccattttgtacaagcaaataataaactaaagcccaatcctgatcatttgcatatggatcgtagaatccgccctttactccgttaaccttatttggataaatataggcgcaagaagcttttccatcttcaaagaataaacacagattatttctcacaatattctctgcacgctctttatatgaatgatctcccgtacattgcgaataaagataaaaagcagctcctgacaatgtactccaatagtgtggaaaagtatctccccacatttcccgcttaccaaaccaataaccatcccaatgacgaacagctatttcattcaaatgataactgggttgtttgccattgaaagcttccaatacaggcatttgaatctttgccccatccaaatatttctgccttccggtttccatataaagttgaagcaagaacatgactgatggagctacaatggcttgttcgtagtttacttcactagccggataattcaaaccatttttcaaaaaagtatcaccaactgcaatataatcattctccagctcttgatattctctttgcatatcagcattttttaaagtttgtagtcctaagcgaaccggtatacctatggcataaaaaccatgtccgaactgtttgaacatagaccgcaaagtcatataaccatgtttagcatattgtttgtcattggttattttatacatctggaaataaaaatccgctacccatacataattgtacgccctgttacgtcccttctgatcgactgaagagaaagtcttatagtcagcatcttgcaatctattacgcaaaaaacttgcatatcgcaataaagacgcctttacttcagcaacaggatgcaattgataatactttgctaaaagtacccccataccgactctttcagcaccttcatccctgtcaaccggattacagttatgcgtattattcagatatatttcattcttttcattatcataaaccatataagcatctctacgcgtattcgaacttttcatctgttgatttgcaactataaactctactcgttttttaatcaaatcattcacattactaatcaccaaacaatttgcatgagtttttttccctgcgccatatagtatatcaaaacgcacttctcccaactgatccattactacttcagcataccatgctgttccttgttttttcatagggatagtgacatcattctttttaagtatacagtcttttaccatctgcccacctgatattttcacaagggcagtttctcccttctcaaatacatacttgttgcaagatacccagacactctctctttccaataacttttgacggaaatcatctccacctttatgcgaaaagatataccacgaaaatacttgttcatcacccggcatcaatttcatatccggaagattcaaagaaataattcctcttgtatgagagttacccttatttctatcacgctctgatatttcataacttttaatttcgccttccctcaaaaccagtcccaaatgtggagcatatcctcccatacgtgttgcgtttacataagctgcattatcaccctcccatatatgagcattagcccgcatatttatacaagcttgtgcccctggatagttatcgttgaatggagtatagatgcctatatccgataaaagtatttcctctgttccatcattttggaaagtatactcttctattaaatcttctcctctcatactcctttctacaaggatacatatatctccaactcgataagtaacttctctcccatcctgctttatactggcaggaagattccaaaacaacttgtttttctgatttcttctcacctcagtgaaatagccaagtccccaaccataattctcctttatccaaggatattggctaccatctgttgcaatcagccaattcatattctgtttatcattatcaatattcattgattgtatggctccagttttcgaattcactgtaaagtttactttttgggctttaacagaaatacatattactgtcaacaacccaataccacaaagctttaaaaaaggattctttacttttcccattgacatcatcctatttttcttaaaacagggcttacttcttttagataaatctaaatccattgtttttcatttaattaattatagctattaaaaatcttattgccaagtaattattcaaagataattcttttcaaaagggaaaaagtactataatcattcaaaagggaacagtaataaataaaaatacctcatccttgtcgagggcaattccccgtttgactaaatttcattcaaatctgttcaattttaattcaatatttcaaaatccggttgattaatcaattgtatatccaagcaggatacacttagagagcaaatagtaaaaagaaaaaattcaatccatttattcgctagaatcaaagaaagtccctatctttaccccaagtaatttttattattcaccattaaatgtaaatattatggcaagtagaagagaacttaaaaagaacgtaaactatatcgcaggagaattattcaccgagtgcttaatcaatagtatgtttatccctggtactgacaaggctaaagctgatgaactgatggctgaagttttaagaatgcaggatgaatttgtcagccgcatcagccatacagagccgggcaatgtgaaaggcttttataagaaattccgagtagatttcaatgcaaaagttaacgagattattgaggccatcgggaaattgaattaaagatcagaatgaagaaagcaatttatagctttatctattaccgcctgttagggtggaagacaaacgttacggtacctaattatgataaatgcgtgatatgtgccgcaccacacacaacgaaccttgatttatttattggaaaactgttttatggagcactaggccgtaaaacaagtttcatgatgaaaaaagagtggttcttttttccgttaggaattatttttaaagctgtaggcggaattcccgtagaccgtagtcggaaaacttcgttggtcgaccagatggttcatcattttgctgaatgcaaaaagtttcatctggctatcacacccgaaggaacccgcaaggcgaacccgaactggaaaaaagggttttattacatcgcccttaaggctcaagtgcctatcgttctgatcggtattgactatagtacaaagaccataacgtccactaaagcaattatgccgacgggagatcttaataaagatatgcgggaaatcaaactgtacttcaaggatttcaaaggaaaacatcctgagaattttgcacttggagaactttaagaataaagtaataagtaataggtattaagtattaatcgtagctgctgaaatgctgctccgcatggtatattacctattacttattccttattacctattacttattccctattacttaaaacaggcatcatggattcgattcgtatttccatagtacaaaccgatatcgtttgggaaaacaaacaagaaaatctccgtttgctccacgagaagctgcaaagtctccgtggaacaacggagattgttgttttaccggagatgttttctacaggattcagtatgcagagtgatatgctggcggaagcaaattccggtgagacgattacagcactgaaacaatgggcttctttgtttcaagtggccatctgcgggagttatatcactgtagacaacggaagatattacaatcgcgctttctttctgacgccggaaggagaagaattctattatgataaacgccatctgttccgcatgggacgtgaggcagaacatttctcggcaggcgatgaacgtctgattatcccttaccgtggctggaatatctgcctgcttgtatgctacgatcttcgttttccggtgtggagccggaacgtagccaatcaatatgacctattaatatatgtagcaaattggcctatcccccgccgtctggcatgggatacactgcttcgtgcccgtgccttggaaaatcagtgttacgtatgcggggtcaacagagtaggtatagacggatatcatctgaaatacaacggaggaagtaaaatctattcagcgctcggagaagaagcggcttccgtgcccgacgaaacggagggcatagcaaccgctacgcttcatctgaccgcacttcatcagttcagagaaaagtttccggtatggaaagatgcagacgaattccaactccgccattcgtgataaaacaaatgttaaaaacgatttgaaggtgcaacaatacctagaagttagtagttaattatatagacttcttttgtatctttgtcgtgaaaatacagtcgtaaggactctaatcttacataacttaattaacaactttatgaaaacaaatcttagttctcaaatcactctccacagggtctcccccagatactacagaccggagaatgcatttgaaaaatcagtcttgacaagactcgagaaaatacctacagacatttatgagtctgtagaagaaggggctaactacattgcttgcgaaatagcacaaaccatccgcgaaaaacagaaagcaggacgcttttgcgtactagcactccccggaggtaactcacccagccatgtctattcggaactgatccgcatgcataaggaagaaggactgagcttccgtaacgtgatcgtatttaatatgtatgaatactatccgttgactgccgatgctatcaacagcaactttaatgctttgaaggaaatgttgctggatcatgtcgatattgacaaacagaatatattcactcccgacggaactatcgccaaagataccatctttgaatattgccgtctgtacgaacagcgcatcgaaagtttcggaggcattgacattgccctgctgggtatcggtcgtgtaggtaatatcgcattcaacgaaccgggttcacgtctgaactctaccacacgtctgatcttattggacaatgcatcgcgcaacgaagcatccaagattttcggaacgatagaaaatactccgatcagctctatcacaatgggagtatctaccattcttggcgctaaaaaggtatatttgctggcatggggggaaaataaggcagcaatgatcaaagaatgtgtggaaggtccgattagtgacacaattcctgcatcttatctgcaaactcacaacaatgctcatgtagcgatcgacctttcggcttccatgaacttaacacgcattcaacgtccatggctggtaacatcctgcgagtggaatgataaactgatccgcagcgctatcgtatggctgtgccagttgacaggcaaaccgattctgaagctgaccaacaaggactacaacgaaaacggtctgagcgaacttctggcattgtttggttctgcctacaatgtaaatatcaagattttcaatgacttgcagcataccatcaccggatggccgggtggcaaacctaatgctgatgatacctaccgtccggaacgtgccaaaccgtatccgaaacgtgtggttatcttctctccacatccggatgacgacgttatctccatgggaggaaccctccgccgcctggtagaacagaaacatgaagtacatgtagcttacgaaacttccggtaacattgccgtaggtgatgaggaagtggttcgtttcatgcatttcatcaacggattcaatcagattttcaataacagcgaagacttggtaatcagcgagaaatatgcagaaatacgcaagttcctgaaagaaaagaaagacggtgatatggacagccgtgacattctgactatcaaaggtttgattcgtcgtggtgaagcccgtactgcttcttcatacaataatattccgttagatcgggtacatttccttgacttgccgttctatgaaaccggtaagattcagaaaaatccgattagcgaggctgacgtagagatcgtacgcaacctacttcgtgaagtgaagcctcatcagattttcgtagccggagacttggctgacccgcatggcacacaccgtgtatgtacggatgccgtattcgctgctgtcgatcttgaaaaagaagaaggagccaaatggttaaaagactgtcgtatctggatgtatcgtggtgcgtgggctgaatgggaaattgagaacatcgaaatggctgtgcctatcagtccggaagagcttcgtgcaaaacgtaattctatcctgaagcatcagtcgcagatggaaagcgctccgttcttaggtaatgacgaacgtctgttctggcaacgtagcgaagaccgtaaccgtggcacagcaacgttgtatgatcagttaggactggcatcgtatgaggcaatggaggcatttgtagaatacattcctctataagaaagaaaattcttaattaatagaatataaaacaatcaaagaagagtgggcagttcgatacttcccactctttttttgtttatttttgcaggagattttgccacagaatgcaatggacttacatgaatgcgagattcatttcgtattctccttccaaaaggggaaatgccatcaaggggaaagtggcggacatagataatcataggatgcaacctaaagagtggaacgatgaaaaaaataatagtctttcttctgtgcctgacaatgggcaccagtcttctcttcgctcaggatattgagagaaatataaaagagcggttaacggattactttgccaaatacacagcgacagctaaaatcagtacaccgaagctgaacagtttcgatattgattatgaccgcagaaccattcagatttatgcttcggaaagcttcgcctaccagccatttctgccggaaacagtagaaaccatctacaatcagatgaaagaactgctccccggtccggtaaactattatcagatcaccatttatgcagatggaaagcccattgaagaattaattcccaacttatacagaagcaagaaaaaagataaagaacgaatggcgctgaacaccgaatacaaaggtgctccatgggtgaaaaacacttcccgccccaatgagatatcccgaggattgcaggaccggcatattgccctctggcaaagtcacggtaattactataagaatgacaaaggcgaatggggatggcaacgcccccgattattctgcactacagaagatatgttcactcagtctttcattcttccatatgtcattccgatgttggaaaatgccggtgccatagtgtatactcctcgcgaacgggatacacaaaagaatgaaatcatcgttgacaacgatactccgaatgcttccctttatttggaagtaggcagtaagaaagcacgctggacgactacttccgtgaaaggattcgcccagaaaaaagccatttacaaagatggggaaaatcctttcactgacggtaccagccgatatattcaaacagaaaagaagaaaaaaaagaataaggatcaggcttttgccgaatgggtacctaccctgccggcaaccggaaaatatgcggtctatgtttcatatcagacactacccaatagcgtgagcgatgccaaatacctcgtctttcataatgggggtgtcacggaatttaaggtcaatcaaaaaataggcggcggtacttgggtatatctcggaacttttgagtttgacaaaggaaataatgactacggcatggttgtactgagtaatgaaagtagcgagcatggcgtagtgtgtgcagatgccgtacgcttcggaggaggaatgggtaatatctcacgcggaggaaaaataagcggactcccccgttatctggaaggagcacgatattcatcccagtgggccggtatgccatacgatgtatatgccgggcgtaaaggagaaaacgattatacagacgatatcaatacacgttccaatacaatcaactatctgtcgggaggctctgtctataatccgggacaaacgggtttaggtgtacctctggaaatgactatggcacttcatagtgacgctggatgcagtaaagacgatgaaatcatcggttcgctcggcatctataccaccgatttcaataatggcaaactaaattcgggaatggacagatatgcttcacgtgatcttgcggatatcctgctgactcaaattcagaaagatattcgtacgaactacaatctaccatggacacgccgcagtatgtggaaccggaattacagtgaaacacgacttcctgctactccttccacgattatcgaattgctctctcatcagaactttgcagatatgcagcttggtcataatccgaatttcaagtttaccgtaggacgtgctatctacaaaggtatcctgcaatttataaacagtcagcatggcaaagactatgtagtgcaacctcttccggtcagcaacttcgctatccatttcggaaaaaagaaaaacacactggaacttacctggaaaggggaagacgatccgctggaaccgacagcccgtccacgggaatatatggtatatacacgcatcggatacggaggattcgacaacggaactctggtcagcaaaccctattacagtgtcaaagtagaaccgggacttgtctattcgttcaaagtgacagccgtaaaccggggaggagaaagttttccttctgaaatcctttcggcttataaggcaaaacgtgaacgagagagaatcttgattatcaatggattcgacagaatcagcggtccggctgtcattaacacaccggacaaagccggatttgatctggaacaggatccgggagtgccttatttatccaatatctctttttgcggggcacaaagcggattcaaccgttcacaagctggaaaagaaggagaaggcagcctgggacatagcggcagagagctggaaggcatggagatagcaggaaatacgtttgattatcctttcattcatgggaaagccattcaggcagcagggaaatacagctttgtctcgtgcagcgacgaagcggtagagaatggaatcgtcactttagaagattacccgatcgtagactatatactcggacttgaaaaggaagacccgatagccaaagcatattacaaaacattctcttcaccgatgcaaagactgattacaagctattgccagtcaggaggtcatttgttcgtcagcggtgcgtatgtgggaagtgacatgagcggaacacaagggaaccgggagtttacagagaaagttttgaaatacggttatcagaacagtctgacagacaaaagttccggtcaaatcaatggattaggacgcagcatcacgatcccccgcctgcccaatgagaccagttatgctgttacggcaccggactgcatcgttccggtagctcccgcatttccagtatttacttatgcacgtggcaatcagtcggcaggcattgcttacaaaggagcagactatcgcaccttcgtactcggctttcctttcgaaagcattcagtcggaaacagatcgcgccagcattatggccgggatactaggtttctttactcagaaataaagtactcacggatataagatttattttctgaaagcccggataaaaatatccgggcttttttaattcgtttttcattttaaattctatctttgctcctagtaataacccttaaaactaaaaaacgatgtatactatacaagcaaaccccagcggtacacgcagcatagaggtgtccagcgaaaatctgaaaacaatcgagaaatatgccttattccgccatctcatcgatagtaccggaattgtagacgaacccgtactggataaactgaaactaaatattcgttccctgattgccagtcaggaagaggacagtaaagaattgctggatctttgcatagatgttatttatcacaataacatgaaagcattcggcctgcaacaactcatcaagctctatctcacctggctttccactcaggatgcggaagaggaggaagaataatgattacggtagatacctgcggaacaacagcttacagtcctttgattcctgcaatcaaagctatatgcgaggctcctttcggtgaaacgctcgaaattatcatgaatcatgcagatgctttccaagacttaaaggaatatctttccgagcaaagcatcggttttcgtgaaatctatgacggagagcaaatgacattgcaatttacaatcaatgagaagttttaaaaaaacatcttaatgattgaagttaaacatcccaatgaataaaaaaatcattgggatgttttttattatccgtatctttgcggcatgaaagaatatcgattgaccgattggttacctaccaccaagaaagaagtggaactccgcggatgggatgaactggatgtcattcttttcagcggtgatgcttacgtagaccatccctcatttggcgctgccgtcatcggacgtatcctcgaagcggaaggtttgaaagttgcgatcatcccccagcccaactggcgtgatgacctgcgtgacttcagaaagctgggtcgtccccgattattcttcggcatctctgccggaagtatggactcgatggttaacaaatacactgccaacaagcgtctgcgcagtgaggatgcgtacactccggacggccgtccggatatgcgtccggagtatccttccatcgtatacagtcagattctaaaaaaactctatccggacgttcccgttatattaggaagcattgaagcgagtttgcgccgtctgagtcattatgattactggcaggataaagttcagaaaagtatcttatgcgatagtggcgcagacttactgatctatggtatgggagaaaagccgattgtagaactaacccggaaaatgaaggaactgcttcctgcggaggatgcttcattgacagccggtgaactcaagaaaatagcgggaactatccctcagacagcctatctctgtcgtgcgacagagtggactcctgccgcagacgatattcagctttactcacatgaagagtgtctggctgacaaaaagaaacaggccagtaatttccggcacatcgaagaagaatccaataaatatgcggcttcccgtatcacacaagaggtagataataaagtagtcattgtcaatcctccttatcctccgatgagtcaggaagaacttgaccattcgtacgatctgccctatacccgccttccccatcctaaatacaaaggaaagcggattcccgcatatgatatgataaagttctccgtcaacatccatcggggatgcttcggcggttgtgcattctgcaccatttccgcacatcaggggaagtttatcgtcagccgcagcaaggagtctatcttgaaggaagtaaaggaggtgatgcagttgcccgacttcaaagggtatttaagtgaccttggaggcccttccgccaatatgtatcagatgaagggtaaagatgaagcaatatgcaaaaagtgcaaacgcccgtcatgtattcatcccaaagtgtgcccgaatcttaattcagaccaccgcccgttattggacatatacaaagcggtagatgccatccccggcataaaaaaatcatttatcggcagtggagtgcgctacgacttattgctccatcagagtaaagacgccgccaccaatcgcagcacggctgaatacacacgcgagttgattgtcaatcatgtgagcggacgcttgaaagtagctccggagcataccagcgaccgggtgttatccatcatgcgcaaaccttcattcgaacagtttgaaactttcaaaaaaatattcgaccgtatcaaccgggaagagaatctacgtcagcaacttataccgtactttatctcttcgcaccccggctgcaaggaagaagacatggcggaactggctgttatcaccaaacggctggactttcatctggagcaagtgcaggactttacccctactccgatgactgtagccaccgaagcatggtacagcggatttcatccctatacactggaacctgtattcagtgccaaaacacaacgggagaaactggcgcaacgacaattcttcttctggtataagccggaagaacgaaagaatattctgaatgagttaagacgtatcggccgacaggatctgatagacaagttatacggaaagagaaacaaatgaaaccattaaaacggcttccctattgactttgccttttaaatttcgtatatttgtggaaacaaatccggaattaaaagcatgaaacgtacaaatataaagacataaagatataatttacatgtataagagtacattgtaaggagtaagaatggggtgaagtccgcaaggatttcaccccattttgtttaattaattcctctcattccgaagaatttagcaaaatatagtttataataaacttgggacccgtttattataaacgtcctcactatttattataaacgtgatgtgagtttatgaagtaacttgtataagaaagagaaaacaaaaatcacagatgacagagaaaaggcatcagacgaaaatatattcatacatttataatgaacaatatacttttactaataccttcctgttctctttccaatcatgataaataaatcatggagcagccttttcagaaagaggtgtcgaattaaaatttatatcctttgtcggagtgatggtattggtagctaactcatagacgaaatatatagaaagagccggtgaatatacagcaaattttgtactcccagtctgattatagtaaagcctgaatgtgcaaatatcagtagcggaaatgaatggttcctttttcagatgtgaatggataggaaaaacaatcattggcatttgatccgtaacttctaccggaagaagaccggaatgaaatttcctccatgattggatttctccttctttatcagcaataaacaagtagtcattgccgaaaggtataacccctcctttggatgtcccagaaatagcatagaatttataaccatctttaaaaggaatgagaatccagtttaaaggaaagtctttgtagccataaatcggatattccttttcatcagcaaatgcactccgtattttctctctaactttaattaaatgcatttcatattcggacaggcctctatgagtcgtcacttccgaacaaggtgtcgtctcgttaaggaaggagacttcatatgtacattgagactggttatcaatcacaaggcatttaatcgtatctccctgttgataagtaagaataccttgtattgtttccatcagttccggtttaggcaaaaacatatcagtgaaattccaggcagccgtttcatatctgtacaaagtattagcttcttctacaatagaatcacatttctgttttagttcagcttccgtataactctcttgcgaatacaccgttaaccacgatgataataggacgatcaatgtcagcatgtttttcatattcattattttttagattttaaatggctcttacttgttcttatctgtgtctttagatcaaagataagcatttttgaatataaaaaacaaacattgctcctattatttatcaattaatgatcatccagttctttcaccggcaacgctacaatctcctgcaacacactaacggcagtttccacattagtcacatcctttatcagcatactccgtcggccgttctgctcacgcaggtcacaacgccgggtatatttcatcatgtaatctatcattttgccaaacgcctgactctgatagaacggactatccgcattggagacaaagaatagcgtcatacgtccgcccttcaagaagactttctccactcccaatcgcgccgccaagcgacggaggggaacgatgcgaagcaattcctgcgtttccggcggaacaggtccgaagcggtcttccaggcggaaacggaaggcatccacgtctttatccagcgtcagtccgtccagttcgcggtaaagcaacatacgctcgctactgcccgtcacataggtggccggcaacagaagttcaagatcgctttctatctgacattcgtctacaaattcttctccactgatctgaccttctccctttatttcatctgcatacaattctgcaaactcatcattcctcagttcatgaactgcttcggcaagaattttctgatacgtttcgtaccccagatcggcaatgaagccactctgctctgctccgagcaggttaccggctccacgtatatccaaatcctgcatagcgatatggatgccacttcccaaatcactgaagttctcaatcgcctgcaagcgtcgttttccttctgccgtcagactgctcaacggaggcgccagcagataacagaaagcctttttgttactgcgccctacacgtccacgcatctgatggaggtcactcagaccaaagttctgcgcttggttgatgatgatcgtattggcattcggaatatcgataccgctctctatgatagtagtcgccaaaagcacatcatagtcataattgacaaagtcaaaaatgatctgttccagctgtgtgggctccatctgtccatgcccgatggcaacacggcaatcgggaatatgacgttcgatcatcgctttcagttccggaaggttcgcaatccggttgttgacaaagaaaacctgaccgttgcggctcatctcaaaattaatcgcgtccgtaatcacttcctcattaaaggtatgtacttctgtctgaatcggatagcggttaggcggaggcgtagagattacactcaggtcgcgggctcccatcagcgagaactgaagcgtacgtggaatcggtgtggcagtcatggtcaatgtatccacattcacctttagctgtcgcagcttctccttcacagagactccgaatttctgctcttcatcaatgatcagcaagcctaaatctttaaactgaacatcttttcctaaaatacggtgggtgccgataagaatactgacttctccttccttcagtcctttcaatacggctttggactgagctgccgtacgggcacggctcaaatattctacccggcagggcagatccttcaaacgttcgcggaatgtctggaaatgctgataggcaagaacagtcgtcggcacaaggaccgccacctgtttattatcggctacggctttaaacgctgcacggattgctacttctgtctttccaaaacccacatctccgcacaccaagcgatccatcggacggtcgctttccatatcggccttcacctccatcgttgccttactttggtcgggcgtatcttcatagataaaggaggcttccagttcacgctgcaagaagctgtcagggctgtaagagaaacccttttcctgacggcgctgcgaatatagtttaatgaggtcgcgggcaatatctttaattttcgccttcgtacggtctttcagtttctcccaggcaccggtacccagtttattcagtcgcggagcttctccgtccttacctttatatttggaaactttatgaagggaatgaatggaaacgaacacgacatcctcattctgaaagacaagtttcagcacttcctgcgtagtatctccattcggaatgcgtaccaaaccggagaaacgaccgataccatgatccgtgtgaaccacataatctcccggagtaaactgattcaattctttgagggacagagcgaccttacccgaacgggccttgtcacttttcaagttgtacttatggaaacggtcgaacagctgatgatccgtaaaaatacacagatgcagcgtatgatccacaaagccttcatgtatcgtacgtactacaggagtaaactgaatcttatctccccggtcttcaaagatggctctgatacggtcggtctgcttagtgctgtcactacagatataaagtgaatatccctgttcaagatagtccttgaaagaaccggccaccagatcaaagttcttatgaaaaataggttgtacggaagtatggaaagagatctttgcatccggcgtaccagtcggtttattcccaaactccatccggcggaaatcgagggcacgtaccgtaaattcactgccatcaatcagcttgccctccagcgtgataccgccattttcttcggcttcctgtacggcaatagcctgtggcgtcaaagcctcatcgtgcactacctggatacgctcgcgcaaccaaaggaagtcacgcattgccaaaacggtttctttaggaatgaaatcaagaaaagaagttgtcacatctcccgtcactgccaggtcagggactatagccactccctctttcctctcacgggacaactgcgactctacttcaaatgtacggatactctctacttcgtcaccgaaaaagtcaatacgataaggatattccgaagcaaacgaaaagacatcaatgatactaccccgaacggcatattgtcccggctcgtacacataatccacatattcgaaaccatagctatgcagcacgtctgtgataaaagtagtgtccagcttctctcccacattcagtttcaaggtcttatcgctcagttccttgcgggatactactttctccgctagcgcatccggataggtaacgatgcacaaaccttcttctcctttctgcaaccggctcagtacttctgtacgcagaatctcgttggccgcatccttttgtccgtacttgatggaacggcggaatgaagacgggaagaacaacactttctctgttcccagcacttgtgtcaggtcatgataaaaatagcccgcctcttccagatcgcccagtacaaagacaaacggacacacatcttgtttcaccaatacagaagagaaaagagaagcggaagaagcacataagcccccgcaaaaaatagtttgaacggacgcatccttcagcagtcgttccatgactgccgtattaggatgagcggcatattgttgttgcaactcaattattgtcatagctataaaatttcaccgcaaaagtacgaaaaaagaaccgggattgatatagtcacaccgaagttttcttcttcaagattgtttcaagccttgaaactattggtttcaaggcatgaaaccaatagtttcacaccggggaacaaatacaaacgcgttaaattatccttagtccctctataactaaaggaaaagcgctacatttgtcttaaaaataggacttctatgcaattatcagatagcatcgttattatcccgacctataatgaacgggagaacatagaaaatattatccgtgccgttttcggtttagacaaggtattccatatactggttatagaagacggatctccggacggcactgcaagcattgtgaaaactttgcaacaggaattccccgaacgcctctttatgatcgagcgcaaagggaagttaggattgggtactgcttacatcgcaggattcaagtgggcgttggagcacgcatacgaatatatcttcgaaatggatgccgatttcagccataacccgaatgatctgccccgtttgtacgcagcttgtgcaaaagaaggaggagacgtatctgtcggctcccgttatgtaagtggtgtgaatgtagtcaactggccgatgggacgggtgctgatgtcttattttgcctccaagtacgtccgcttcattaccggtattccggtgcatgatacgactgccggatttgtatgctaccgccgtcaggtgctggaaacaatcgatctggaccatgttcgcttcaaaggatatgcttttcagatcgagatgaagttcactgcttacaaatgcggattcaaaatcatagaagtccccgtcatcttcattaaccgtgagttgggaacttccaagatgaacagcagtatctttggagaagccatattcggagtgatcaagttaaaaataaatagttggttccataaattcccgcaaaagaaatgaaacgtatactgataaaaaacgccgtaattgtcaacgaaggaagaaaagttccgggatctgttgttattgaaggtgagaagattgctgagatcttagttgacggacaagaggctgccatgccttgtgacgaaacgattgacgcatccggctgttatcttttgccgggagctattgacgagcacgtacatttccgcgatccggggctgactcataaagcagatatcacaacggaaagccatgccgcggcagccggaggagttacctcgattatggatatgccgaacacaaatcctcagaccacaactttggaggcgctgaatgacaaactggctttgctggcggaaaaatcatctgtcaacttctcctgttatttcggagcgactaacaataattatccgttattcagtcagctggacaaaaaccgggtatgtggggtgaagttatttatgggttccagtacgggaaatatgctggtagaccggatggcaagtctgcgcaatatcttcggaggtacggatttactgattgcagcacactgtgaagatcagggaatcatcaaagagaatacggataaatataaaaaagaatacggtgacgatgtacctttgtcacttcatccggtcatccgctcggaagaggcttgctaccgttcttccgctttggcggtacaattggcacgcgagaccaatgcgcgtctgcatattatgcatatttctactgccagagaactgagtttattctccaaagcacctttggcagagaagcgtattactgccgaagcgtgtgtgtctcatctaatttttaccgaagaagattatcagaccttaggagcgcgcatcaaatgtaatcctgccatcaaaacggcagaagaccggaaggctttgcaggaggcagtcaacagcggcctgatcgacgctattgcgaccgaccatgctccgcactgcttgagtgaaaaagaaggaggcgcattaaaagccatgtccggcatgccgaccatacaattctctttggtcagtatgctcgaattggcagacaagggtgctttcagcatcgaaaaggtagtagagaagatgtctcatgctcctgcacaaatgtatgagatatgtaatcgcggatttatccggaaaggatatcaggcggatctggttttggttcgtcccgacagtgcgtggactgttaccacagactgcatcctgagcaaatgtaaatggagcccgctggaaggtcatactttccactggaaagtagaaaaaacatttgtgaacggtcatctgttatatgataacggaaccattgacgagaattatcgtggacaggagttaagattcagataaacagcaactcgtcacttataaacatatgattttatcttataagatacataacgtcgccccctacatcaattggatttactttttccatgcatggggattccaacctcgtttcgcagcgatcgccaacattcacggttgcgatgtctgccgtgcttcgtggctgactacttttccggaagaagaccgcaacaaggcttccgaagctatgcaactgtttaaggaagccaaccggatgctggatttacttgacagggattatgaagtgagaactatcttcaaactttgcaaagcaaactcggacggagacaacctggtgattgaaaaagaaaccgatcaattcctaattttccctttgctccgccagcagacgcctaaacgggatggaagcccgttcctttgcctgagtgactttatccgccctctttcttccggcattccggatacaataggtacctttgcttcttgcatagatgcagatatggaaggcctgtacgagcaggatccctacaaacacttactcgtccagactctttccgaccgtctggcagaagctgctacggaaaagatgcacgaatatgtacgcaaagaagcgtggggatacgccaaagatgaaagtctgtcaatgcccgatctgttggtcgagaaatatcaagggattcgccctgccgtaggctacccgtccctgcccgatcaatccatcaatttcctgttggacgaactgctggatatgaaacagataggcatcacactgaccgagaatggtgccatgtaccctcatgcttcggtctgcggtctgatgtttgcccatccggctgccgaatacttctctgtcggaaagataggagaagaccagctcgaagactatgcccgccgtcggggaaaaagtacggaggaaatgcgaaaattcctggctgccaatctgcaataactttcgtttacttgtgatttttctccttttcgcacgactaactaaccagaaaagtaacccatttaattcatgagagaacgaacaacagaggcaaccaaccctattgaacaggagttcttatcggtcatccgcgaatatgaacgggtgatctacaaggtatgttacttatataccaatcctaacgccccgctcaatgacctctatcaggatgtaatactcaacctctggaaagcctatcccaagttcagaagagaatgcaaaatgtccacatggatttaccgcatcgctctgaacacgtgtatcagctttttccgcaaagaaaagaatgtaccggaaatcgtcaccctcacccgcgaagcggactggatgatagaagaacatgacccgatccacgaaatgctgaggcaactttatcaaatgatcaatcagctgggacaactcgacaaatcaattatcctgctttatcttgaagacaaaagttacgaagatattgcggagatcaccggactgacggtgaccaatgtggctaccaaactgagccgtatcaaagacaaactaaaaaaaatgaaaaaggagtaatcatatatggaactggaagaactgaaaaaatcatggaatgccctggatgagcacttaaaagacaaggagctgatcaaagaggaagaacttggcaaactgataggacatgcagacaaaggtatccatgccattgcccggctgaatatcaaactaatcctgatttctttgccggtattggtcttattcctgctggaagtcctgttgcacggcagactgaatccgatctatatcattatcattctatcgtggattcccgcactctactgggacatcaccaccacccgttttctacaacagacgaaagtggacgaaatgcctctgatagaggtgatcagtcgtgtcaaccgcatccaccgatggatgattcgggaacgtctgattgctactgctttccttcttatactggcagtactctcatttatttattggcagatatggcaatatggaatagccatcattctgttttttatcctgctttggggagctgggctggggctgatcttgtggatttatcgcaagaaattcctgaaccgtattcaggaaatcaagaagaacctggacgaacttaaaatcatagacagttgaccagagtcagatgcttcgcctatttcaactaaaaatttaatatccgtgctgttatgttgcaacgcctatttatatttttacttattttccttattctaccggacatttatctgtatctcagatttatcgttcatctgacggcaaaacgctggctgagaatcctctactggctgcctgctttcctgttatccacaggattactttatctggtttacttctccaataacgcctttgccgaacgccatacacaagctattggatggttttccatctttttcttcctgtttacggctcctaaattattgctgtctctctgcacaattatcgggatacctttccacaaatggctacgctggccccgaactccctttatctgtaccggactgacactagctgtgatttctatcgtaatgatcatctacgggtcttttatcggacgcacgcagtttaacgtcaaagaggtaacttattcctcgcccaagcttccatcggctttcgatggataccgtattattcagctgtcggatattcatatcggaagttggcagggaaatgcttccgctattcagaagttagtaaaactggtgaatgagcaacaggccgatcttattgtctttaccggagatctggttaatcatcgtgcagtcgaactaaatgattttcaagaaatactgtccggactgaaagccaaagatggagtctactccattttagggaatcatgattacggtccttatttccgctggaaaagtaaagatgagcaagacgataatctgaatgatcttctgcaaagacaagccgctatgggctggaagttattgaataattctcatacgattctgattcagggcagcgacagtatcgcccttattggagttgaaaacgaaggagaaccgcctttctcccaatatgctgatctccccgaagcgatgcggggaaccgaaggaatgttccagatacttttaagccataaccctacccactggagacgggaagtacttccacaaacagacatcgatttaatgctggcagggcatacccacgccatgcagttaaaattcgggaatcattctccttcctcttacatctatcccgaatggagcgggatgtatctggaaggaacacgtggtttgtacgtaaatgaaggcatcggctatgtcggacttcctttccgcttcggtgcatggccggaaataacggtgcttaccctacgacggtaagcacgctttttccattgatcttcttatgtacctgcacctgaactgaaatacgttcactcatttcctgtacatgggaaatgactccgattttccgtccctgcatctgtagctgctccaaagcttccatggctgttctcaggctgtcagcatccaacgagccgaatccttcgtcaataaacagggattctactttcagattattgctcgaaagcgaagataagcccaatgcaagtgccagtgaaatcaggaaagattcacctcctgaaagcgaatataccgtacgtatctcatcacacatatcgcaatcaatcacctgaagcgccagtgtatcggggacttgctgtaacttataccgcttggaaagataagccagatgtttgttggcatggagcaatagcagatttaaagtataactttgggctatgactttaaatttcgcaccgtcggcactacctatcaatttattcaatttagcccaacgtacggcaactgcctgcttttcggcaagttctttggctatctgctcaaagattgttttattctttgcctgctgcaacagacgtgcctccgcagtcgacagcgcacgttccgtattaagattatcttcctgttgtttcgctatagtctgaggaagctgatccggaaattcgatacctttctgttgctcccgaagttcttcaatgacaacggacaattgtttcatttctccctgcaggccggaaagatgattttgtactccctccacttgtttacgagccttttccaacgcctcattcaattctttttctcttcgggcaacagcagcctcagcttcgtccgcactcttcccttttaataacaaagaacgttcctgtcggagtgcatccaacgctttagcaatcacttcgaatctttgttgctcatcaacagctgctttttgtaaaatagccgactgttctttagcggctgataccttttgcgcagccaaacgacactgcgagacattctcacgcagagcatcacagtgtgtccgcaatttctttattttctcatcgttctgctgccattccgcatacagatgctgataagctgaaatacgttccgccaactcatttaaccgattctgtatctgttcttcctctccagccggcaatccttcttgttgcaaaacggacaattgttcttttatctgtacctcagttgctctttgatgggttaaatctcgttgcaggacaatgctgcgattatttatctgctgataagcagacactgcgatattatattcctgttccatattccggtaaagagtatccactacctcttgttcccgatgataaggatgtgtcgtacttccacaaaccggacaagcctccccttcctgcaactgctgacgcaatgctttcacatcctttcctaccgccatacgggcattttcataaagccgctgcaaggctttaactacagcatcctgctccgccaactgctgtgtacaagcagtcacttccttttccagtttctctatttcctgcttcgacttcgattgttcttcagtcaatttctttatattctgcagacgcgtcagttctttttgaatcttaccctgctcatctaccaaagaaggataaccgaaagaatttaaccggccaaggcgttcttcattcacctttgtccatgtttccaatgtatccttttcctcattaaggatgacctcaatctgttccagctgcagtgactccacatctgtacgattcaacagacgactcaaagaatgataggagatccgtaactgctctaccgcagatgcagatttcttctcctgatccgccacctgctgacgggcagcctgcaaaatttgttgcgactgtatataccccgcctgctgcgactgtatttgtacatccagctgacgtgcctttttcaaatccggctgtatcgcttcccactgtgctttaaaatgaaccagcccttcttcctgaacaaccaaagcatcctgtagattcttttgtttattcagttcctcctgctcttcctgctgctttttcatccaaagagcttcctgcattttcaatgaacgaaccacattcaattgcgcattcagttctgccagcaatttaatccctgccgcacgtttctcaactaactgttctttctctttctgcaaggtgagaagttcttcttccggcaacaactcaatcacactcatcttactttgaatcatcgtcacctcttcttgtgcagccttattccgggcaaaaatctcctgagagatgcgggaataaactcctgttcccgtcaatttctccagtagttccgctttcgacgcccccctggatttcaaaaaagttgcaaagtcgttttgtgccagcaatacggtacgggtaaattgctcatacgtcaaaccgaccaactctaccaactgtgccagcaattctttcttcgttccctgaaattctttttccgtatccaaatctttcacctccaacacttggggctgcaaagaaccactcgccttattccttgtccgtctgaccgaccaccgggaacgatatcgatgtccgtccactccttgaaaatcgacttccgcatatccgtcactcgtcccccgacgaagcagatttctcacatccgactgattgatctggttatctcccacatctgccagattgatactctccaccgaagccgcaaaacgaggagccttgtcatataatgccagacacagagcatccaacaaagtcgactttcccgctcctgtagcaccggaaattgcaaatataccagccgaagataacggttccatcgtaaaatctatttcaacactgccttctatcgaagtcagattcttcaatcttattgctataattttcattctccctcctcctcttctttacgagttgcggaaatatatgcttcctggaataaatcagtcaggtcggcaggcatttccgcctgataaaccttttcgaatgcagattgcgcaatctgcaacggagacatttcctgcaatccctttttccagccatcaacctccttttccactctttcttcctgacgataagcagaaacgatacgtgccagacgatatttcttaccagccaatgcctcttctatttcctgacgaagcataggttccggttcttcaagcaaaaccttgacttccagataaggagcttctccatccacctccggtaaatctcttaatatttctattattttttccggtgaagcagcctctccacccggcacactgataagaggtatggattgtggacactctatccttctgatatcaaccgcacagccttcatctaaaatcaccatcaccactccatgatgataatgcttctcggcaaaagacataggaatcggacttccggcatatcttacattctccctgccggatacccgctgtgctttatggatatgtcctaaagccgtatacgctatcttttccgaaaaagtatcgggtgatacacattccaaaccaccaatcactgtccgttcgctataatccttctcggcaatctctgatccggtagcctgtaaatgaccgacagcgagaatagcctgattcgttttccggcgtgcccacaacctttgtaaaagtcgcgcgtaaagttcgcgaactccttccatatatgggttcccttctgtctccactaccggataatctccctgccgcaaaaaaggaacagccatacaaagtacttctgcttccccttcgcgattcttcaattctattgtcaaatgatcatagtcaatctctccgccctccaatttgcgcactacccctctgacttccgtccgcatcgcctgcaacaaaggcagaggagcttccaaacgcgccgcagaatcatgattaccggcaacaatcacaatttgcagtttcggattctccgcagtcacccgataaataaactcataatatatgcgctgagacgcagcagaaggattggaaacatcaaacacgtctccggctataaccaatgcatcaatctcgttttgtcggatttcttcggccagccaatcaagaaaagccttatgttcttccgcgcggtcgtaaccaaaaaatgtctgtcctaaatgccaatcggcagtatgtagtatacgtatcatatcattatctgtctataacagaagacaaaaatagcataatcgcaaagattatgttgtatcctactgctttttttaccaataatcatgtatctttgcatatatcctcaaatccgcaactaagcccttgaacgtccttattgcgtttacacgtcctctcattactgaatttgcagataatttgaacttgaagcacccacttctgcctacaatatccccttaccccacaatgtgacttgaggcaatacacaatatcattcccataagttgtaggcattatccaaaatcagtctggaaaacatctgcgtaagcattattacaggtatagatgttcagcacataccgccttgatgtcctgatccacttggctggtacagagataaacctgaagacaaacgcttttatgcgacttgttgcattgagcccgaacttctttacgtcaagtctttgaataatggccttgtaaaagttacggataagtgctgtaagaagaaggaacactgtgttctctgccatgaaggatttgggcaatctgtcccacccgaaaccattgttcatatcatcgaagatacgttcctttcctccacgaaggttatagaactcgacaatttctcttacggaagaatcatagtcgttagtcaggatacaacggtatgtgtattctccttcccaaaaatcctgcacaccatccatccgtttctgtctttgaatcacaagtcgatatgccttacctttccacttctcaacaaggatagagttcaattcaaactcaatgccattgatttcctcagttttccagcctttgagagcaaaggtgtcattgtagatcgaactgcagcggttagcacggatatagaaggacttgcagtgtttttctatttcctccacgatttcctcggaacatgatccacaatcagctctgaagcgattgatagtgagcccattctgttcaaatctcgcaaagaacctcttcagcgtgtccttctgatggaaacgaacatttgtgttaccatcgctattctctataccgactatcaaatcgccaataaccgccacgccagggcgataaccaaggaacttcttgtatgtaggctttgcatcatacttctctgtctctatgaactgatggtcgaaatcaacatcatacatctcaccctctttcagttggccagatgcaaatatacaattgagcaataaagtattgagagtgtcagccgtattgaaatcgtaggtcttgcccatatctgatgtgtatgaaatgttttcttgcgtcaactcctttatcgccctgaggatagtatcagagctacaagtgcgaagtgtcggatgaagcgagaggtggttcatcaaatgagtagtgacatcctcaatacatgaaccgctacagaagtagatactcatgagagaacggatgatttcgctgtactgataaccgaacgatctacaccttagaccgagggttgagtcgattacagatgataatgtggagtcaaattgctccatgattgaaaataatcccccaaaaggagtgagtctctcagatttaatttgtatcttcgccatgtctatcgtcggattctcttgttttttttgcaacactaagataagtgaaaattctgacatggcaaaatcctgagcaactttttgttgctcaggtacttaaaaagtttaatttataatagtgttgcggaattaaggtatatataaaaataaactccccatgaagatactatattatatttatcaaatttgtattgctttacctatcctattggtattgactattcttacagcgattgtcaccattgtaggctctttactaggaggagctcatttctggggatactatccgggcaaaatatggtcacaactcatctgtctttttctgttgattcctgtaaagattcacggtcgtgaaaaattacacgggaagacctcttatatctttgtgccgaatcatcagggatccttcgatatttttcttatttatggattcatcggaagaaatttcaagtggatgatgaaaaaaagcctgcgtaagataccatttgtaggaaaagcatgtgaaagtgcaggacacatttttgtagaccggtccggtcccaaaaaagtactggagaccattcggcaagcaaaagattcgctgaaagacggggtatccttagtcgtttttcccgaaggagcacgtactttcaccggacacatgggatatttcaaaaaaggggcgtttcaattggcagatgacttgcagctggcagttgttcccgtcacaatcgacggttcttttgaaatcctgccacgtacaggcaaatggatacatcgccatcgcatgattctgaccattcatgaccctattcctcctaaaggaaaaggtatggaaaacataaaagctactatggcagaggcttatactgctgttgagagtgcacttcctgaaaagcataaaggaatgatcacaaacgaagaccaggatcggtaaaaaacgaaatgcggggatactcacgcacccccgcatacctaaccagtctttatgcattaatctattaaatcaaaaagtctatatattatgtagaaatcttattgtctggttagacatcatttgcaattcctggaatgtcaaagcaaatcctctccttatttcctcttctaatcgttctaaagagaagtactctgcttttattccattgattttgcctctaaaataattattgtattgttcatgcaatgtatctggagtaactaaacctccaaaaccatattcccccactacaataaccggttttcgttgtaataccccttcataggccataccccttgcgccaatgataagcccagcctcatttacagcttcacttatctcctcgtcagaaaagatatatctcacctgatactcttgtattgtatctaatagaatacttactctcaattttgcacggggacaatcaatccccactgcaatagaagaattatattctatagattgctgtttgtcaccttcccaagtgccaatagcaactgtatgatgactattcattatataaaagttaaggtctagttccttatttattctattactagttctccgtatacgtatccgcctccggctactttaaattctagtttataaacgcccggagcccatccttctatagagaaagatgttgtttgtccaggagccgttacctgacagacttcctgtacttgtccatctactagtattttcacttcgcccaaaggagctgtgaaaatgatttctacaatattatcatctgtagaaacagacgcattaataggtattacaggaatagaacgatgggtagtagttgggacttctccctttaacacaacaggcaattttctctctacccgatccgtactctcaatagcaatcatatttcctgcaataaataatgcagctaaaaaagataaaataaaacgtactttcataactatattgcttttttgtttcgccaaaagtacggtatgtattcgaaaaaacaaaaaaatcaacccggacaaattacgagagaaaacaatcaaataaccacctattaatcaaaacattaagaaaatatcatttaacatttacccggacaatccattttttatttctcagaattctttcaaaaaagtgtctaaatcatcttgtggagaaacacctaatcgaccttttaaccgaccttttgccctagttacagaatcagaagtagtatgaaaaatgcaactcaactcttcatgagtcaaaccgaatttaagaaagcagcaaatctcaagatcatgttttgttaaagttggagctctttccaacagcctagtaacataattccaatacatcagatcaaatagactgaatagtttttgcctctcttcatttgatagtttacctcttaatgtaccttcttttatagctaataaaagccgaaaagcatggataaatgagctagaagatgttccaacatttaattcacctcccaattctttcaaatgttccgacaatgttttattctgcattgtcaatagtataatcttcccattaagttctcctacttttgtacggttttcttctaacatcaaattctcctttaatacttgatcttttgatatttgaatatcttcaatttcctgttgatatcgttctatctcttcttcattctctcgaatctgcgattcaatctcagctattttctttttattattccggtttttataataataatagcacatacaagcaacaacaatcaagaaagcaatcattccccataacataaaattcgtatatcgtaccttcatatgtaaattgtcattctgtagtttttcattttcatatttcttctgtagacttgctattaattctcgagaattaagttcttccatagcattagttatggaatcggctaattcatggtagactattgcctcctcaaaattatcaatatctttttctagaaaatacaaacaatcaaatgcactaatttgcgtatatgccttagaagatttagcactcatctttaaatattttctagcattttcggtctgtcccatttgcatatacaaatatcccaaagacaagcattccatatattttttctcttcatcagtttctttttcataagcagctaaaaaataacgttctgcttccgataattcttgcatagaacgatataaaatacccaattcatgcaaaattgaaatttcagacaaattcttttttacggctatttccaaagcattattgtaataataagaacagctatcccattgagatttaaacaaataaactctagcaatattttgactaacactaataatcccaagagaatccttcagccgtatatgggtatccaatgcttctcgaaaattggataaagcatcatcaaatagctcctgccttcggttaatcatgcctatttcttcaagaatcaatgccaacattttatgatccttagttctctcataaacatcttttgccgcaagaaaagatttcaaggcttcttcctccttatccaattcaagcataactcttccatgataaaatagagcctttgcatacattattggggaggtctgagttattgtatagtaattcagagctaatgcaatcaacgaatccgagctaaacttcatatagttcttatccattgcctgcgtcatcagaagagcataagtcgcttgtgactcaccccacaatttttcaggatcatgaataccttttaataggtttagagcactatccggacatagatccatacacttttccacttttgaaaaagtcatgttgagagcgtccgtatctctatgacaggaaactgccaaaaaagataaaataaagaaaaaagcaatacgaatagaaaaggacgttttcatcttatcttgagttttatgcaaaaatacgcaaaaaactcaagatttatttcttcgaacctacattttgttgcatccgttgatgctcttctatcaattgcatgttctctttggccttcgtcaagaactctcgcaccatcttattactcttaaaagaatagggagcatcctttattatatcatctatttgtggagtcataataggatatggcaaagagctgcaaagcattataaatacattaggtcctaatacattttcataattatccgagatgaaagtcttgacatattgattcatcgctttcatcagtgaatctccttctgcaagtaactgttcatgaacttcttccaaatcagcaccatccatcaccatacgggtttcttttctttccagttcaccgatgctttcttccattgcattcttctttgcaataaagtcatacaatgctgtgttcaaaggagttccaaccgctttaaggtcggtattgctaatggtaataacgatcttgccactttccaacacaaccggcatgacactttcgtcatccatataaagtgttgtcatttgtacagaatcaattttccctttcattgaaaatgatccatgcactacttcagccgagtccagttttgtccattctccatccctcaaagtcttcagatataacatttttccatccagaccatttactgaagatgttccttctatcttatacttatgagtacacgaagctagaaagggaagcaaaagcacaaaaggcaaaatcttattcacgttcattgtttcattaaattctgggtacaaaggtacaactgattcggacttaaaagaaacattttatcaatatttaaaacttgtaagactcttttctttaataatccttataaacagaggtgggagatcatttttttcatttagtttatctaaatttgcagtcatgaaagcaacaacttatgcaccttttgccaaaccgctttatgtcatggtaaagcccgtgggagccgtatgcaacctcgcatgcgaatactgctattatttggaaaaggcgaatctatacaaagaaaacccgaaacatgtaatgagcgatgagctactggaaaagtttatcgacgagtatatcaactctcaaaccatgcctcaagtgctttttacctggcacggtggagaaacgctgatgcgtccgctttctttttataaaaaggcgatggagctgcaaaagaaatacgcccgcggacgtacgattgacaattgtatccagacgaatggaaccttgcttacagacgaatggtgcgagttcttccgtgaaaacaactggctggtaggggtttccattgatggcccgcaagagtttcatgacgaatatcgcaaaaataagatgggcaaaccttctttcgtcaaagtgatgcaagggatcaatctcctgaaaaaacatggagtagaatggaacgctatggctgttgtgaacgatttcaatgccgaatatccattagacttttataatttcttcaaagaaatagattgccattatattcagttcgctccgattgttgaacgcattgtttcacatcaggacggtcgtcatcttgcctctctggcagaaggtaaagaaggggcattggctgatttttccgtaagtccggaacaatggggtaactttctctgtacaatttttgatgaatgggtaaaagaagatgtgggcaaattcttcatacagatattcgattccacattggctaactggatgggcgagcaaccgggcatatgtacaatggcgaagcattgcggacatgccggcgttatggaattcaacggagacgtatactcttgtgaccacttcgtattcccggaatataaattgggaaatatctatagccaaactttggtggaaatgatgcatagtgaacgacagcataacttcggaacaatgaaataccaatcactcccaacccaatgcaaggagtgcgactttctatttgcctgcaacggagaatgtccaaagaaccgcttcagtcggacagcggacggcgaacccggtctgaactatctgtgcaaaggatattaccaatactttcagcatgtagctccctatatggatttcatgaaaaaagaattaatgaatcaacaggctcctgccaacatcatgaaagcactaaaagacggaagtttaaaaatagaatattaacatcataatttataattgttatcataaagtaatgaacagactaagactttatttattagcgctgacagcgctgctggtatgtaccgtaaaagcggacgaaggtatgtggttattgcaactaatgcaacagcaacattccatagatatgatgaagaaacaaggattaaaactggaagcccaagatttatataatcccaatggtgtctctttgaaagatgcagtcggtatattcggaggaggatgtacaggagaaatcatttcaccggaaggcttgatcctgactaaccatcactgcggttattcttctatccagcaacacagtagtgtagaacacgattatctgacagatggcttttgggctacatccagagatcaggaacttcctactccgggactaaagttcaccttcatcgaacgtattgaagatataacagatattgtgaatgctaaaatcgccgccaaagagattacagaatcccagtcattcaccggtgctttccttgaaggactggctaaagaactctatgaaaaaagtgacctgaaagataagaaaggaattgtaccgcaagcccttcctttctacgcaggaaacaaattctacctgttctacaagaaaatatatccggatgtacgtatggttgccgctcctccttcttcagtaggtaaattcggtggcgaaacagacaactggatgtggccccgtcataccggtgacttctccatgttccgtatctatgcagatgccaacggagagccggctgaatacagcgcaagcaatactccgctgaaaacgaagaaacatctgtcaatctccatcaaaggtttaaaagaaggagactatgcaatgatcatgggattccccggaagaaccagccgttatctgactgtgtcagaagtaaaagaacgcatggagtcaaccaatgaaccgcgtatccgcattcgtggtgcacgcctggctgttttgaaagaagtgatgaacgccagcgataaaatccgtattcagtatgcaaacaaatatgcaggctccagtaactactggaaaaactcgatcggaatgaacaaagcgatcattgacaatgacgtattgggcactaaagcagaacaggaagctaaatttgctgaatatgcaaaggcacaaaacaataccgaatatgccaatgttgtgaaaaagatcgatgatctggtagcacaaacagctcctctcaattatcaactgacttgcctgactgaagttttcttcggagctatcgaatttggtaactcaatgttaactaaaacacgggaagctttggttgataaaaacgactctctgatcaaagttcgtctggaaggtctgaaagaaaacttcaaaagcatccataacaaagactatgatcatgaagtagaccgcaaagtagctaaagcactgcttcctctctatgcagaaatgattccggcaaaccaacgccctgctatctataaagtgatcgagcaaaaatataaaggagattacaacaagttcgtagacgatatgtacgataagtctatttttgccaatcaggctaactttgataaattcctcaaaaagccgacagtaaaagctattgatgaggatctggctttgcaatatgcccaatccaaatacgatcaatacggcaatctccttgatcagctaaaagagctggacaaagaacttgctctgctccacaaaacttacatccgcggtttaggtgaaatgaaattacctgttccttcatatccggacgcaaacttcaccattcgtctgacctatggtaacgtaaaaccatatgatccgaaagatggcgtacactataactattacacaacaacaaaaggtattcttgaaaaagaaaatccggaagatcgcgaatttgtggtaccggccaagttgaaagaacttatagaaaagaaagactacggtcgttatgcattacctaacggtgatatgcctgtctgcttcctgtcaaccaatgacattaccggtggtaactccggcagtccggtattgaacgaaaacggagaattgattggctgtgcattcgatggcaactgggaatctctgagtggtgatattaactttgataacaacctgcaacgctgtatcaatcttgatatccgctacgtcctgtttatccttgagaaattaggtaactgcggccacctgattaatgaaatgactatcgtagaataaatgagaaaacaaattatatttgctattttttcactggcaactcttagcatccacgccgatgaaggtatgtggatgctaactgacctgaaagcacaaaatgcagttgccatgcgggaactcggtctggagattcctgttgaagaggtatataatgccaatggcatctctctgaaagatgctgttgtacacttcggtggcggatgtaccggagaagttatttcttctgaaggactggtactcaccaatcatcattgtggttacggagctatccaacaacatagtaatgtagagcatgattacctgacagaaggattttgggccatgaaccgtgatgcagaacttcccacaccgggattgaccgtcacttttatcgaccgtatccttgatgtaaccagttacgtaaccgatcagttgaagaaagatgaagatccgaacggtactaattatttgtcgccaagttacctgagcaaagtggcagaacgcttcgctaaagatgaaaatatagaagtcacccctgcaaccaaacttgaacttaaagctttttacggaggaaataaatattatatgtttgtaaagaccgtatacagcgatattcgcatggtaggtgctcccccctcttctattggtaaattcggagccgacacagacaactggatgtggccccgccataccggagatttttccctcttccgcatctatgctgataaaaacggcaaacctgccgcatattctagagacaatgttcctttgcaggtcaaaaaacatttgaaaatcagcattgccggagtacaggaaggtgacttcacctttgttatgggattcccgggacgtaactggcgatatatgatttccgacgaagtggaagagcgtatgcagactaccaactttatgcgtcaacatgtacgcggggcacgtcagaaagttctgatggagcagatgctgaaagatcctgccgtacgaatccattatgcaagtaagtatgcatcttcagccaattactggaaaaatgcaattggtatgaacgaaggattagtacgtctcaaagtactggataccaaacgtaagcaacaagaagaactcttggcccgtggccgcgaaaaaggtgatgattcttatcagaaggcatttgatgaaatacgttctatcgttgctcatcgacgggatgcgctctatcaccaacaagcccttaacgaagcacttgtcacagcacttgactttatgcgcctcccttctacgactgaaatggtcactgcccttaagtcaaaagacaaagaacaaataaaaacagctaccgaaaacctgaaacaagccggtgaaaaatactttgcctctgttcccttcccggaagtagagcgaatggttgccaaaaccatgctgcaaacttatgccaattacattccggaggaacaacgaatcaatattttcgagatcataaactcacgtttcaaaggaaatatagattcatttgtagatgcttgttttgaatattcgatttttggtaatcccaagaactttgaaaagtttatcaaaaagccaagcttatataaaataggtcatgactggatggtgcttttcaaatactccatcacagatggaatattgaaaactgccattgccatgaaagaggccaatcagaactacgacgctgctcataaggtatgggtaaaaggaatgatggacatgagacaagaaaaaggaatgcctatctatccggacgccaattcaaccttacgactgacttacggacaggtactttcttacgaacctgccgacggagtagtttatgacgctcatactacactcaaaggagttatggagaaggaagatccaggaaactgggaatttgtagttccgcagaagttgaaggaactatataaagccagagactatggacgctatggtaaaaacggtgaaatgcctgtctgctttattgttaatactgataatacaggaggaaactccggcagtccggtattcaatagcaaaggacaactagtgggcacagctttcgatcgcaactatgaaggtctgaccggagacatcgctttccgcccctcctcacaacgtgccgcctgtgtagatatccgctataccttatttattatcgataaatatgcaggagcctcccatattattgatgaactgagtattgaataaatggataatgaaaaatggataatggaaaatctctatgcagaatggcatcatcaattctccattatccattttccattatccattaaataaactcttctatcatatacatctcatctatcatttcattcattgtttcctgcaaattcagcacagcttcttcaggagactctccgtaagcattacattgcatattcacagtcaaccaggcataatatccgccgtctgacgcccgctcaagtacataatctgttttattcagtttcatatcggtaaataattagtaaatgttggtattgaagtaattgctgattgtgatgcagccagtttttccagttccagaataatacgtcgttcaccgctacgtacccaacgaacgaaagtacgattaggagaatacgttccggcaaaacggagtaaaggctttaaatcaaaagaatcactgataatcccggctcctgccctcattgcatcatgagcattacaatcctgctcaatatgtgccggaaccatcaatacaggttttccaagatacattgcttcacagatagattcgaacccggcagtggtagcataagcgcgacaaccggccatcccattaagaaacttcacatcatctatctgatagaaacttagtgtttcgtcaatccgggtcacctcctctgcatctgctttgtcccagaaaaacctcaaaggaacttccggatatatcgtatgaaattcctccacactatctgcaaaaccggaatttaccatataaccatgaatataatttccttcttccggttgaatagcagttacttcctgccgaattaaaggaggaactaccaccacttgttgtcccctgcccggttccatatcattgaaagataaagcaagtttcttcgaagatctaacagctgtcatcttggtgaagaaacgcagcatccgtaattcaaaagagtttttatccggaaattcaaaattctgatgtaaaaacaagtattggtgtccgacgcagacatatggaacggagggacgaaagagtgcgtaggtaagtcccgtcagaagctcgtagaagttgatcactacttccgcccccgtctccttaatccgctgattaatatagcacatactgcgaaaatattccggaatacacagtaaattgtaagtaaagcttttctttagattcacccgtttattatctgccgcaggcaagaaattagggctgataaaacgtttgaccggtgcctgtatattccggttgaaaaacccgggcaagatacgtgatgaactctcaccgactaatacttccactacttcatgtccattacgcaacaacatttcttcaagggtaatagcttgtgtcaagtgtcccctaccctcaccttgtacaataaataaaaatttcatgaggctatcattattagtttatttcttatttatttgtttttcgttatgcaaagttcccttttccagattacaataagatgactctacaattactattttatgaacaaaaacagctttttcccgttatattagtaaaatagaaattatatttgcagtcttcaaagactgatatttaaatttaagaaaggaaagattatggaaaagtttgaagatttaatacagtcaccggtacccgttttagttgatttctttgcagaatggtgtggaccatgcaaagcgatgaaaccggttttagaagaattgaaaacaatggtaggagataaagcccgtattgtgaagatagatgttgaccaacatgaagatttggctactaaatatcgcatacaggcagtgccgacttttattttattcaaaaatggagaagccgtatggagacattccggagttatccatagcagtgaattaaaaggaatcatcgaacaaaattacgcataaaaagaaaatagcgaatgaagaaagtattagcaatggtagcatttgtcatgttgagcgttatcgtatacgctttcaatgacaaaccggataccaatcaaggtaaaaaagaggtaacaggtaacggtgaagtcgtcgtaatggacaaagaaatgtttctgaaagacgtcttcgattatgagaaatcaaaagagtggaaatacaaaggtgacaaacccgccatcatcgacttatatgcagactggtgcgggccttgccgccagacagctccaatcatgaaagaattggcaaaggaatatgcagggaaaataacaatctacaaagttaatgtagacaagcagaaagaacttgctgccttgttcaacgcaacaagcattccattgttcgtatttatttctatgaaaggagacccgcagcttttccgtggagcggctgacaaagcaacctacaagaaagctattgacgaatttctactgaaataaagagtcccaattatagtgacactatccaatgtggatagtgtcactatttttatatacagaataaagatcatttaaagtatcccacgggatgattcatcataggaatctgactgtctttcagtttcaggactttcttcaactgagcagcatccatcgaagcacgtggcactgtagccagtttagccgcagaacagaaaacagaaatattctgagaaacaataccggcatccatggctcccattaattgattctgtgttttctgagcatcaccaaaacgggaaatatcactgattaacaccaaagataccggagccgtttttacaaaagcctgaccacccgctaccgctccacggtaatctccctcagcaatcagatttaactgatgattctttgcgtcatacaagtaacttccttccggcaatatcacatatacgtctacatcctgcttattcaaagcggaaggagccgttcgttttccagcatccgaacgattgattccgttggccgcccataataagtccgataaatcagcaagagttaacgctttcgaagcatactcgcgcgtagactgacgttcagacaatgccttcatcaccgtaccagtacgatttaaattaggttttggtaacttaacaaccttatcagcagcaaaagcagccactgaaagcattaaacaaatgaacaatagttgtacctttctcataattgtggtatttataaagttgataggcaaatataaacaaaaaaggtctgcattcactatagaacacagaccttttaaaagttatttataaggctttattatttcttatctccgaaataacggttgtaaagtccttcaaaacctttaccatgacgagcttcgtccttgcacatttcgtgtacagtatcgtgaatagcgtccaaattcaaagctttagcacgggtagcgatacgttttttgtcttcgcatgcaccttgttcagcatctttacgcttttgcaggttagtttttgtatcccaaacacagtcacccagcaattctgcaaatttagaagcatgttcagcttcttcccaagcatagcgtttgaaagcttcagctacttcaggataaccttcacggtcagcctgacggctcatagccaaatacatacctacttcagtacattcacccataaagtgattattcagatccttgatcatttcttcgtcacaaccttttgcaacaccgataacgtgttcgtcagcaaaagacaatgcaccaccttctacttcaacaacttctacgaatttgctggcaggagctttacacaaaggacatttctcaggagctgcgtcaccttcataaacgtaaccgcatacagtacatctaaattttttcattttcttctcaattttaaattaattagtcaatacgtgtttctttatcttttcttaagcaattcttacatatacctttataataataatgaacttctgtcacttgatgcccatccatctcctgattctcaactgtcttcacagattccggacatttcaagtcataaatatgaccacagcgcctgcaaagaaaatgtgagtgtacagaagtatctgcatcaaaatttgtatttttctcatcaatcgtaagcatcaacgcagctccttgttccgaaaacagtttcaaagtgttgtaaaccgtagtttttgaaagagtcggcattgaaggagacaatgctgtataaatatcatcagccgatggatgaataggatgattcatcaaatattccatgatagctatacgctgcatggaaggcttgatattatgttctaacaatcgttcatatggtttcataaattccccttcttttcaaagttgtattcattacaattataaatctgatgcaaatatagaaagtcccgatatcatttccaaataaaatcaatattttttttgcagatatgtattactaaattcttccatacaaaaaaggccatcttaagaaagatgacctttagacattgatatacctttattttgccttaattcttattggttttagcctcttcgattattgattcaggtactttttcgcaacggacatatttattcacgtcactatcatcatcttttgcagtccaaatcatagagccggattctagcaaatccgttacgatatagtcattgttccagtcaccattaccaaaatcatattcaccgctaataacatatcccagatatggatcgttttctatactaaaagaaccagtaatataacgtgcatacatactgtcaaacttctgatacatttcaaaagtcagttctctacgattaaaagttatatagcaatatgtaccttctgccagagcttgtccgttccattcagaaagttgccacgttccgttcaaattagcagcagtgaccggcaaggcaggaatctctaccttttcatcgtcgtcacaggatgcgaaacaaagcacgaaggcgaataaagccattaatttgagaatattcttcatgtcttctttttatttttattgttacttaatacagtttacttttatattcaatgtccggtctgatggttgcccttccactccttctataataataggaaaagtaaatgaacgacctttttccacaggaatcagtgaggcgtctattgtgatcacaatatcggcttcactacccggactgattacttccggctcggtacgaaaagttgcaaactcaggaataacagcagccgacaaacgcaatgattgttttccgctgttaccacacaggattcgttcggaaggacgctttcccgcatttacttcccgaaattctatccggttttgtttcagtctcaatttacccatcttatatggataacgtccccattcatccgttcccggcaacacattaccaattaatgtaaggcgtgccacgggcattttgtccgaagaagacagataaacaaaagcattcgtatctattgttccaggatgattcttcggatgataagtcaatactacaactctcgtttcactgggagacatctcccctgtacgtacatctgctaccgcacatccacaagtagttcttacacgggtaagatttatggctttgccacttacattagtacacgtgaaacgatacatttttggagcatcatcttcggtcaatgtcccgatattcagcacagtctcgtcaaaacgcagaatatgttccgccccttttatcaacggcggatttatcagcgtatctgttttttcctgtggagtgaaatggacattccgggcttcaaccgcccggaattgtccgatgactacacataataaaaagaatcgtatccaagtaactggtttcattgaatattaaaattacatccaaccattatcattagccttcttgcgaacggtaacagtaatggattgttcgcttccattgcttactttcactgtaatacgggttgcaccggtttttaccccagatactgtcataaacgtaccattgacagatactgaagcgacagttgtatcccccgatgtgcaggtataagttagattctctccattaacaaaataataggcaaggtttaaatccgatgttgtaccttctgctacatacatatttggtactaccatgtcagaaccattaccctcaatattgttaagcaacattccggcatctagcaatccagcacccatcttaccaatatatttcgataactctactctagtagcggaagctccggatgagatgtggttacgatagtaagccttcacttctcctgtattataccagctatcgagtggttttgtagatgacttcaatagttcgacaaactcacttgctttaaaatgacgacgttgtttgacagcatacgacaaacccaatgctacgactcctgatacatgcggacaagccatagacgtaccatccataaatccataggtcgcattaccgttttgtatccaagtcgagagaatagaaccggaatggattccttcttcccaaccctcagggtcatcttgccccaccggattgtaatattccgtatcaccacccggagcagatatcgtgacttcctttccatagttgctatatgaggccggagtaaaatcggccgctaccgcactgactgatatacatttggaataagcagcagggaatgcagccattcctgcatattcgtttccggaagcgaaaattgccagtcccccgtctatcaccccattgggcgaaccggcattattgataaagtagtccaatgcatctttttccaacggatacaatttttcccattcctcttccgatcccggaccgggagtatatccttcaatcagattggccaaggaagagttgtatccccagctacactgaagaatgactgcgccattatcagccgcatattttatagctcttgcttcagcatccaaagtaacaccggcttcacccgcaaacacttgacatgacataattttcactccggagtttttggaaccatcgccaccggcaataccgcaaacaccttcgccattattgttcacagcagcaatagtacctgcaacgtgtgttccgtgtcccgtgtcaactgcatccatccacgaaatgattcctgaattgctcacgaaattgtaaccatatttatcgtccttatatccgttaccatcagcatccttatctgcataaaattcttccttttcattgatccacatattacctttcaaatcaggatgggtatacatcacaccttcatccagcacagcaacaataatagaaggatcgcccgtacacttcttccatgcttccatacaaccgacatcacaccccggcctggaaccatttttcaatgcattctgattgtcaaaagggttattgccactgttattataatgccattgatatgccaatccgggatcagagaaggtgtttcctgtcgtaacagtacgtgttgccgccttctgtcgcaatgcactctcactgacataactccgatagccatcagttctgtaagcacgctgtatgtgactattagcctgcactttagctatttcgcctaatttagcaagacgaccggcggcttccttcaagtccgtattttcatcaaactttacccgataccacaaatgtaatcctgaagtacgggtacgttcttcatttttagtgtctaccggaaatatacgttcaaaatgatatgcacccagaatatccaacacttcgtcagtagaaggaatcccggaacgggtcatagcccccccacttcttgttgcaactgtgagagcctgatcaagaatctctgtcattgcaggatcgaatttaatcagcaattcaccggaagtgacatcagccggaagctgaacttccgtcccccctgttggggtagagggttgttcgatcacttcttgttccgagcatgaagccagtatcaaggcaaacagcgctgtatataagaaatttttcttcattgttcttatttaaaattattcttgttaatgatatttactctaaagtcctgctagtctgtagttcccgacaatacaaattttctaaaatacaacggataagcgacaccgctaacaatttgatttgtcccggggtctgtacttccgtaataataagaaaaatcgtagtttacgatatccacattattgaatcccactgtatttccttttgagtttttgccgtcttcttgctgattgaatatcatgctttcgggtccccaatatgcaaagtaaggatggaatagcaaccaattaggcaaagcacctgtcaggaagttcagattaatatgaactgtacgggcaaacggtaacacacgcggaatatcctgcccgcttactggagtctgcttccgatatctcacctgattgtcggtcgtcaacagccactggcaagtatctctagatatcttatccatgaatatggatggcttggcagtcaactcatctttactgaagaaatcatccgattgataagtttccggtttatctgcagctctcaatgccgctctcacctctgcgtctgtaggtaattctccctccaagaagttgtatgacatttgcaatgaaatcagtttatcccaagtcaataacttcaagaaagcttctctttcaggttgtccttgagaaatatcaacatgcagaccgacatccctaccattgtattggttgttcccatcaatcaagctcatatctttcagtgtttccgtagcacgacatccggttaatgtcaaatatctcaagtgcgggaaattcttttcgttcaccacatctgtaactacagacaacgactggaaattattacttgccaaatccaaattctccagtttcttacccaatttaataaaattctcagggagagcatttataccaaaagagaatattgtcagatccttcagatactccaattcacaaatttcttctcctaaagaaatagtacgtatttgtcggttggcattactctgaactgaaaatgattccaggtatttcagatgacgaatttctttggggaatgtttcaccgtcttgcaaatcaatcattgcataacttacagacctcacacgccctacagcttcagtaggaactattccatcttttatttctttatcagtagcttcccaaagggttacaaaactccagttcatcatactttcactggtatcaaaactcatcatgctctgaagtttgctattgatagtaataatagccaatgagtcaccggcacgattatcctcaatcttcatagctgctttttgtgttacagtcaacactacagcatctattatattaccgttattgtccaccaattggtcattctcatctaccggaaccagatggatctttgccacacgggtatagggagccacgttcattccccaacggaaatccactctaagagtacggggacgtgctcctttgtctaaattcaccgctagatctttatccttcggcaatgtcacccaaccgctacgttctccttctacctctcttttctcctcttcagtcatcgtagcctcttcagcgaaagaataatccacacttccgattttgaaatttacgttagtagagatagttgatttaaagtgacggttatcgaatgcatccgaactagggatttccacttcaggttctttcaccaagatttgcttaccgaaaccaaactgtgtaaccgtaaccaagctaggctcccgaccgttcatagtgaaacttatctgtgctgtacgcgcaacattcgtcagtgtagagtctatggtaagttcacataccgcagaaccaaaaccgtttgccggtgaaacggcaatccaaggtttagaaacgcgtaccacccattgatcattagacgaaacggcgatcttctctgttcctccttcggcaccgatagctatttcttctttatctagcgaaatgccatcgatccttgtttcatcgtcatccttgcatgaagagatgatccccatgcaaagaattagtcctaatgttattttactaaaatatttcattaatagattcttttatattatcgttcaatacccaaagcatcacaaccacgaatatcttgtgtcttatcatataacagaacatacatacctgcctcaatataaggacatacgctagtcacatcaatcgagatgttcggattatctgcaatatccaatatataaagctgcggtgtcagtttctcgtctactttacggatgtcgttagaaccaatttgcaactggatcaaactagggcaagtagtgataccggtcggccattggcgcaagatacgattgccttccgcatcacgttgatggcgaattccgaaagctttcaactggctactgttcaacggttgtgtcgggaacgaagagaaacaattatagctaacgtccatattgctcaaataaggtaaggtagtcgcccggaagtcatcagacaagctggtcaatttattgaaacgcaaatctatagtagtcagcaaatacgtattcttatagtttccgtcttttggtttcaatgaattttccggaatcgatgtcattaaattgttactcaggataattgtcgaaatcggagagccggttgcaaacagttctgtagggaacttctggatttcgttatatgacaaggttaccgttgaggcattaatacctttgtaatcatccatcgaacaactgatgttacgtccctccgaacctattttattatacgagaaatctacagatcccatcacatataccgacttggcattgaatatattcggaatatatttcagcttattatgagaaaatcctaagccttccacttgatcggtaaatgcacagaaatcttccggaatctcttcaatctgattgtagtctaacttaaggtcagtcagtttaacattggtaccgaaagcttccaaatgtcttaccttattatgcacacaatcaagtaagcctagtttcaccatcttctgtaaagaagcagatgcgggaaactcttccaaattattataacccatataaaaaatctgaattttaggtcctgtatcctcatcgtcagcgagtcgtgtccaatcagcttttaattggccggcgctaatgcctctgttacatgcaatgttcaatgactgtaattcaggaagatcatacaagaagtccggaagctgcgtcatattcggacagttatacaactctacatccgtgagatctttcaaattactccaactcaattcttcattttcatactgtttggcataatccgagttggcatcttcccaatcgacagcaatattatcataggtaaaaggagaattggcaaaatagataatctgcaacttggtcaaccgttgaatagccttcgaaataaacgttattcgattggtaagattaccgatttgtgtatctttcaatgaaatacggctatccttcttgatcggtttcatttcaggatttctattgatggcatcctgtagtaggtctgacaaattcaagcgttggtcatagtcaaggaacatttttttatagtgcatacgaattctatgctttttttcctcgctcatgtccggagtcagttcttcatctccaaataatctgccgctcaccgtttcgctatgtgtaccgaacgaaagcacttttaattcagttaattgcccgatagcatcgggtactctgcctttggcaccgaaaccggcaagcgagagtccggtgacacgcccattattatccaaatcaacaccgggttggtcaccccacatatcaagttctttgttgaagttccagtttaaactgtgaatagcattgtttatcgtcccactataatatctccaattctttccgtccaaagcttcccaaatggctttcagcgctttataatctttaatgtactccgccgtttccttcaattggatagggacgttggcatcttttgtcaatttgttgtctatcacagtaaaagattctcctcttacagattgcgtttccaattccgatcttttgataccgctttgtgagtaggtggtatatgctactacctgataggtaccagcaggaagccatacggcagagtcgcatgttgctacacctatatccatatacttatcattggcattatcgggattttggtgttctttagaatcttctttgtaggtgactttcatccccttcaattctgtggtgacacgattaaaggaattcatcaccgtaacatcgacatagcgaatattgctgaataaatattcgccggctgcacgtgtactaattccttcttttgacaatttaaaggtaacggttccatgcggaactgcatctacagtcaatgctttttccagcaatcctccacttacaactgtcagttcattgtcttctccggcaggtcctgccaacagtacctcatcaagaccgtcatacagataatagccgacgatcttataagtaccggccagtaattgcaatttgtcactacgcagaccatattccgcattgttcgcattgtatgcgttcagaagcagagtttgtgaaacggtggtaccgttatgcgtcatcaccacctttatcttctgtgcactagacattgattcaagtttgtccgcagcacgagtagttgttcctttctcaaaagaggtactcttatagagtttaaactgcacgtaaccgtattggctttgcagcgcctcgtcatcatcggaacatcctgtcgctaccaacattgtcagcaggccgacaataaaaggcaggaagaatattgagtatattttatgtagattcatttataatctattattcgttataattattcacaagtaaaatatgcattatatattgataaccagcatatgcttgctaccgtcttctccggtaattattaaaaatacagttttagttaaactgcttccattgcccaaccatacattcaaattttgctttccggtactccaatcttcagatatttcaatatctgaagatgcatcaactatcttttcgtcaacatcataacatttgaaatcaactatactggatgtattaagtgtcacaaatatagactccccaatcggcggattttttatatcagaaatatcagttacctcatattgggtaatgaaataattagcacctcccatactaccatcataagctgtacaactcacagtagctaattggctggtagttacagtaaagggcacatctcctccaccgccacttccggcattgctgattctgacaatcaacatcagtttatttcccgattcatcagagactattaaaaatacatctttaccgtttgcagcctctgtatagattgttatgtcagtttcacttattggttcaataacaccattgacctcttgttcaccttcaaagtaatagcatactgaattgctccaattaaaaggcatttttgccactgtagcgaccgatgcaggctgttttatctcaaaaattcctgtcacgccatactctgacttaaaataatctgcatcgccacctgtataagacgtacaatcaataggattatatgtttgaccgtctaccgcagtaatagctagctcatcgccaccgcctttcgtttctttctgagtaaactgaagaacaagattagactgctcatatttataaaccagattttcaccgtcaatgatagtcgcttccaagttatctttgataccctcatattgagcacgtgagaagacaagaacatatccaactctttcagccggttcgtacgaagcaggagcatattcgtctacaataagtgtcactttaccaccttcacgttcgcaacgcatccattcattatagctggcatccatgatatacaaatcattattgttgcttcctttttcaacaaatactacctcataatcatcgttcaatgttttaacagtaaatggaacgcgattcttgagggttgttgtactgcctcccgtacctgccactcctccggcgctttgagtgaaagtttttccgtccaaagatacagcccaatcatacttattggatgacggaagtgtcatttccagtacaccgggcgtcataccatcgtaagaaactctgaaagaatagaatgcttttccctcttcatcggagaaggtaatcacatttttatcagtagctgcaatcggatatttttcgcggtcattgttttctattattttcagaccaccatctactttcttatccaccggaccaacaagagaaccaccatcgagttctacccaacccggcaaattggtagcagcaaagcggaagttagcttgcacactaaactttgaaaagctttggtatcctactttcaattcgttaatctctgttccttcttcatcgaatattttcaattcatatcctgcagccgaacgagtaacttcaccaatcacaattgtctgaccacccattgtcaactccaatttagctacgctaacattatcatttttttggttctcatctgtagctacaatagttacggtttgtgttccggcagttccggatactacaaactcttccgtatcgttgttctgaaacttacaccaaattgctgatgatgccaaactccagttagtattagccgtgaaagtgaactcttttttctcacctgcattacagacaatattttgtttttccggaaatatcggagtcaccgtatcatcatcgtcatccgaacatgccgtcagacagaaagtcataagtaagccaatgaagaagcaactcttgcataacatcttcatgcaggaatctcctagtggttttaaactaaactttttcatatccatttatatttcttatttttttaatattcttgttcttttaatttctccgcttctgcttcgcttatccattcgatcacattgacaaacgtgccaaccgtaccgtatgatgatccatctttattgttcacgcttagcgtgacatactgtaggacgaaattttcgttagtactgaagtaagaagtataagcggcaggttgattcatcagcaacttgccgtcaccgtaaatagttccgaaagccgttcctgtagatgcacaaacctgttcatccatttcaactaggggttcttgaacatcctcacggttgaaagtgatttccgtatcgtatccgtcatagtaaagaccatgtatggcaatggtattttctttgccttctacgatatccgaagttaccagacgcaattctaaattgttcaaataacttgcaaaataagtcgaactgacaacacaataacctgtaaagtttttaatgtcaaacggacggattttctgcattacaacttttgcttcagttccatagagtccccattgttccgtttcaggaattaccagtcgcaatgcaaaacccagcgaatcattaatttccagattatcataaataccttgtacctctaaattggtactcctttctcccgccttaatggtaacggtattcgacagaattttataatgcttaccttccacggcattactttcgcgatcaattacttcaacagcgaaagtccggtcgtgatcggcagccacagtagcagagatcggaacattgaatatctcatttgtttcttgcacggcatacgtataaagcgtgtcagaaaacataagataactggctccgttgtacaccaccttgtcctgatcgcatccggaaagagctatcagagcagcaccgactgctatacatcctaataataatttcttcattatcatatgcttttaatcttatttgttactttcattcggttggacttgtgaaccgggagcgtccaattcgtgctgcggtataggccacacgaacaaaggatcgtcagcttctactttcaagctactaccatttgccaatgactggtcttgtggcttgcgctcgaatcctttatgccaacgtttcaaatcgtgaagacgaaaaccctccatataaagttctttcacacgttcagcttcgataacatccatcgcattagaagcagacaaagcagtagaaccaccgtaagttgaataacgtgccatacggagagtcgtaatatcttttcctgcacgaccatagtcaggttgcgcttgctgcacataagcttcagcacgtatcagatattgttcggagagacgaagtactttaggcatagagacgtgtaggatctgggcacttgtaaattcttcattgcccaaatacttaatcaacaaaggccaggaaagaccgtggctatagccggtagtgtatgtttggaagaaactagacacacgtaagtcattactatcatacgaattgataacccaagttgccggtacataatccggacggtagctactgtagtcatagttgaaaaagatctgccccaaactaccaccataagaatttatagtaaaaccaactttccagatagcttcggtagagaggtcgctagtccacatatatttataatagctaacgttttcggacacataatttgtacaactggacaataggtaataattactgtctattactttactggaatacttaatagcttcatcccattttctcatataaagagctacacgtgcacgcagtgcgtatacagtatattcgttaaagaaggcagcagtgttgtacaaagcatctttgccggtaggctggaagtctttatccaatgccagtaactcagcggcaagatcaagatcgtctaagataaactgataagaatctttcagcgatgcacgcttcatttcttcgtttcccttataatgcctagtcaaaataacacccaattgattggcagcatcttcatcgctttcataagccttgcagaaaagtttaaccaattccgaataggcaatcgcacgggcaaaataggcttcaccgcaacactggtcaatcagatccaaatcatcatcattagttgtgttctttcttacattatccacacggtcgagtagaaagttacagcgattgatcacattgtacaatgcagcataaacaccttcaatactggtattggttgccaatatgtctttccaacgccagatttctccgtaaatattcgtatttccatttactccatatactaagtctgtctgcaaatcgggtagtaatgtaagactcccggaataaagagaactacttttaaaagtatcatagatacctataacagccaagtttatatcatccaccgtttggatagactcgtcgaaaggaatggaatcctcaggcatcttatccaaacaagaagtagcggaaaatgccacaacagccaacaagatatataatttaaatttcttaatcatctttcttttatatactatttagaatgaaacttcaacacctaatgtgaattgacgtgaagccgggtattgtgctctgtaaatattgcttgcaacttccgggtcaagtccggtgaaaccagtccaagtcagtaagttctgtccttgtaaatagacacgtgcagttgagaagaaattagctttcctcaacaacgactgtggaagtgaataagccaatgtaagattcttcaaacgaaggaatgaagtattttcaagaaagcggtcgtctaattttgctactacgtcataacggggaatatccgtaatatcaccaggctttttccaacggtcatataataaccttttggactgattataggtgctatagattccattactctcttcaaagaagcggtcattattcatcacataacgtttagccatccaactaaactgcgctgataatgaaagacctttccacataagggttgttccaaaaccgcccgcccagggagattcataagctttgcctgtcataactttatcttcttcgcggaactcagttgttatttctccgtcagcagtgtaccacaatgcatcaccattagctggattcacaccagcataacgattgaggaaaaactctgtaacaggatgtccaaccatatatttcagtccggttgttgaattaacatattcttctacaccgttgtatagctccaacaacttattcttattataagaaaaattagcactcatattccaggtaaagtctttcgtgcgaacaacatcaccatctactgctacttcaacgcctctattcatcattgcaccgatattatcccaatgcccagattcgccagtcatggcatacgactggggaacaaacatcaatatattggtagtcttcttatgataaaaatccaaatttacattcagccgattgaaaagtccgacactcataccgatattatttgcccaagtctgttcccaacccaggtcttcgttcccactctgcaaaggatatagaccggcttgatcaagataattggcatttccggaaacaagtgcaagatgatcgtagtcaggaatggtcgagttacctgatgtacccgtactcaatttaatctgagcaccagtcagccattccacatctttcaaaaaagcctcgttctttatgttccacataaaacctaatgaccaaaaagctccccaacgatggtctttaccaaaacgggaagaggcatccgtacgtgcggcaacttccgcataatacaaatctttatagttgtactcagtacggaagaaaagcgatatgaaagcatgctcagtattggcatcttgccatgaggaagcgcgtgtaccagaagcaatattcgtcaaacggttaatggtctgtcctctcgtaactacttggaaacctgtcgaacgataatctataccttcctgccccaacataaaattgaatgaatgatcatctttcaatgtccaccgataatttgcagtaagagtttcagtcaggtttagaatatccgacgaactacgtccagcccttcctgagttattattaataatgtagctcggataagacttcataaaagaggtagaatgagaataatcagcaccgaattgcgcccggacggtcaagtttttaacaggtgtgatatctacaaaaacggttgacaacaacttatattttttatgttctacagggttatttgccatccactcaatagggttctgccctgtccctttccaagttccgtcattttctgaagccaaagagccatcagcattataaggattccagtaaggcaacataaagcgtgagccggaaataggagtataaagtgccatatccccttcttcagcctgcgctatttcctcataagccatcatcgtattggtacctatttttaaccagttactggctttaacctccgcattggcacgcatgttatagcgacggaaagttgaactctgagcaataccgtcctgatcgtaaaatcctcctgaaacatagtagttcaaacgatcggtagcacggtttacagacagttcatagctctgcaatggagcacgatcattaaatactttatccaaccaattaatatctgtacgagaaagcaaatcataatccttacctgtgtccaaaccaatttctttttcaaattggatacgctcaggagtattcatcatcatccagttatcacccgatgccaattgtgagaatccccactgtccacgcaatgtcacttttgctttatccattgccaaaccacgtttggaagtgattacaaccacaccattcgccgcacgagctccataaatagaggttgaagaagcatccttcaacaccgatatagattctatgtctcccggactgatcgtattaaagtcagcactggaaataggcacaccatccaaaataaacaagggggaagttcccgaattaattgaattggtgcctcgaatctggaagacagccgccttactaggttctcccgagttagagattacagataatcccggtgtctgtccctgcagtgactgatcaaaacctgcagctggcacattttctagtttctccgctttcacagtggaaacggcaccagcaatcgtcccttttttacgagttccatacgctaccaccactacctcatctattaaagcagcatctgaaaccagacgaacattcagtgtgccggttttggcactaacttcatgtgcctgtgattgcataccgatataagagaacagcaaagtagcacttgccgtacccttaatctcaagagtgtaattaccatcaatgtcggtaattacaccatttgtagtacccttctctaaaatagacacacctaccatcggctcattatcttctgccgaaacaacatgtccttttaccttatatccgctctgtgcaaaaagcataagaggaatattcagtagagcaaagagtacaaacaagagaattgattttctcatctttgatacttgaatttaaattaatgaattgatttatttttattgatttatctacaaaacgaaaacttagcatattacgcttcacgcatgaaacagcaatatacttcttcccttggagcgactttaaaaagtgtacttttatcatcgttccaggacagactattaaatagtctatacaatatatagaataggaaaattagctcggctgatttttaatattacgccatgtgtctaaataaatgtcttgtgtcgctgcaatactaataaagtgtatgtccatctctctaaaattatagatattaataagtgcttatcgtttgtttaggtgtaaattgcctataaaattatttaatttggctacaaatataattataatcgttaaatagaagaaacaaaaagtcgcattttttataccaaatttcctaaaatgtctttttattgcacaattaacaaaatattaataaacaaacagatatatcccatagaatcagtcaaaaatagggctatattactttctatttgacattcttattagttgtttatgcaatagtcattaaaacgacataaaacacctcattttgaggattcggagtcaaaaaggcaaaaatccaaaactatttcctatttttgtacccactatatataaaaaggtacaagatgaactacggattcgtaaaagtagctgcagccgtgccacacgttaaagtggccgactgtaaattcaatgtagagagaatagaaagccaaatcgcaatagccgaaggtaagggtgtgcaaatcatagtattcccggaaatgagtattaccggatatacttgcggtgacttattcggacagcagattttgctggaagaagcagagatggggctaatgcagatactcaataatacccgccaactggacatcatctctattgtcggcatgccggtagtagttaattcaaccgtgatcaatgccgccgtagtgattcaaaaaggaaaagtactaggtgttgctgccaaaacttacctccccaattataaggagttctacgaacagcgctggtttacttctgcccttcaactgacagaagataccgtacgcctatgcggacaaatcgttcccataggtgccaacctactgtttgaaacttccgatacgacttttgggatcgaaatttgcgaagacctttgggctaccatacctcccagttcctcactggctttacaaggagcagaaattattttcaatatgtctgccgataatgaaggaatcggaaagcatcattatctttgttctcttatcagtcaacaatcagcacgttgcattgcaggatacgtattttcttcctgtgggtttggggagtctactacggatgtagtatttgcgggaaacggattgatttacgaaaacggctcattactggcacgtagcaaacgtttctgcatggaggagcaactgatcattagcgaaatcgatgtggaacgcatacgggctgaacgtagaatcaataccacttttgctgccagccagggaaatccaggagataaaaaagcaatctccatcgcaacggagtttgttaatagcaaagagcttactttgacccgaggcttcaattcacatccttttgtcccccaaggagcagaactgaatgagcattgtgaggaagtattctctatccagatagccggcttggcacaacgactggttcataccaaagctaaaacagctgtagtcggtatttccggcggattggattcaacactggcattattagtctgcgtgaagaccttcgacaaactcggtttaccccgcaaagatattctgggagttacaatgccaggctttggaacgactgaccgtacttataacaatgccattgatttaatgaaatcattgggcatttctatccgggaaatcagtattcaagatgcctgtatccagcatttcaaagatatcgatcatgatatcaatgtacatgatgtcacctatgagaactctcaggcacgcgaacgcacacagatattaatggatatcgctaaccaaacttggggaatggtagtgggtacgggtgacttgtcagaacttgcactcggatgggctacgtacaatggagatcacatgtctatgtacggtgtcaatggaagtattcccaaaacacttgtgaagtatctagtgcaatgggtagcggaaaatgatatggatgaggacgctaaagcgactttactggatattgtagatactcctatcagtcccgaattaattccagctgacgaaaacggggaaatcaaacagaagaccgaagacttggtagggccttatgaactgcatgactttttcctctattacttcctgcgttttggtttccgtccttccaagatttactatctggctaatatagctttcaaggatgtatatgacaaagaaacaataaagaaatggctatctactttcttccgacgtttctttaatcagcagttcaagcgctcctgtctgcccgatggtccgaaggtaggtagtatttccatcagtcccagaggtgactggcgaatgccaagtgatgcaagttcaactatctggcttaaagaaatagaagatttataatctctttgatctttcttctgtgacatttttgtatttatcttaagtattatacggggtaaaacagaaatgtcacataactgtgtatcaatcatacagaacatacggtcaattgcactattgtaatacttctcttttaatacgttctatatcagccttctcaatagtgcgaatgatatttttataaatacgatgaaaaccgaaacctccttcggtcatttcctgaatagctttttgctttgacactccttgaaatacaatacgatacatagcacatactgcacctgtcctatcagaaccgtgatgacaatgaaagacgatcggccctttgcggttcttgataatgcgcaatgcattgatcaattgatcttcactgactgaatgcgctttcatttttagccgataaagcttaatctttgttcctgccgcctcatcatcgtcactatgcctgttgcgaagattcagcacttcacgaataccgtatttctccaaagccttaaagtcagcatccgatggttgctccgaacgatatacacctgagtctatctgatacaaattagtcagtttactatcgggaacagttatcttttcagcgtttatgttttgaccataaaccgaaaaagacatcactatcccgataaataaaccaagccaaattcgtttgttattgattatcatatagcaatcctatgagattatataatatgatgaggcaaattatagtactcctttgctcgaaggaagctcaaaatgatagatatctcttttcaatgccattttcagagcacgtgcaagcgctttaaagataccttctatcttgtgatgctcattctgtccttcagccttgatgttcagattcatttttgcagcatcactcaatgatttaaagaaatgcaggaacatctccgtcggcatctctcctattttttcacgattgaactctgcatcccatactaaccaaggacgacctccgaaatcaagacaaacctgacaaaggcaatcatccataggcaaagcataaccataacgttcgattccgcgcttactgcccaaagcctgataaatacattctcccaaagcgatggcagtatcctcaatggtgtgatgttcatccacttccaggtcgccatttacccgaatggtcagatccatcccggaatgcttgcctatttgttcaagcatatgatcgaagaagccaagaccggtagaaatatcacagcttccgtttccatcgagattaagagacacataaatatcagtctccttcgttgtacgacgaacttctgctttccgctcaccggcaaaaagaaattctgccacctgatcccagtctgttgttgcaagtgcgcaaacttcttccagacctttctctttcaaatcatccgttgcttcttgcagataaatagcacggcaaccaagattctttgccagctccacatcagtaggacgatcaccgattacaaagctttccgcaagatcgtattccggattatcaatatacttcgtcaacattcctgtacgcggtttgcgagtcggcgcattatcttccggaaaactacggtcgatcagaatatcatcaaaggtaatgccttctccggccaatgttttcagcatcaagttgtgagcaggccagaaagtttcttccggaaacgaagctgtacccagcccgtcctgattggtaaccatcacaaattcaaaatcaagcttgctacggataaagcccaaattacgaaagactttcggataaaattccagtttttccagtgaatcaagctgataatcaatgggaggttcaatgaccaatgtcccgtccctatctataaacaatattttcttcttcatatactatccttgatattttttgagggcagcaagtaacgtattattctccactctggtgcccaccgtcacacgcagacagttgcaacaaagcgaaatggaatgacggttgcgcactatgatcccttcacctaccaaataattgtaaatcttcactgcatccgttactttcgccaaaaagaagttggaatcggacgggtacattcggactgtacaaggtaatttcgcaaattcttcttccagatagtcgcgttcttccttcaatgtttttatccagcgttctatttcataatatttatgcagcatggcaatagcctgctgctgtgtcagctgattcacattataaggatacttgattttactcaggattccgataattgcttcggatgcaaaagccatacccaaacggatagcggcacatccccaagctttggagaaagtctgaaaaacaaccagattcggatatttatccagctcttcgaggaaagaaggtgcttcggagaaatcattatacgcttcatccaatatgaccaatccttcaaattcgcggagtattttttctatttcagaacgcaacaagtcgtttcccgtcgggttattaggtgaacacaggaaaatgagtttcgtacgctcatctgtagctgcaagaagcttttctgctgagaactggaagttttcgtccaacaaaactttccggtactccacattattcacatcggcacagacctgatacataccgtaagtcggatcgatagcaactacgttatctttttccggttcgcagaatgcacgaaaaacaagatcaatcgcctcatcactgccgtttcctaaaaagatatgctggggagaaacctttttaattttagacaacagtgttttcagttcccactgcatggggtccggataacggttgtgaggcaggttataaggattctcattcgcatccagaaaaacggaagccacagcgcctttatattcatctcgagccgaagaataaggctttagtttccatatattcggccgggtaagttcttgtaatgttttcatttcaatgtatttaatcgtactgtaactgcattcttatgagcatccagaagttcgttggctgccatttcttcaatagccggcccgataactttcatgccttgaggaagaatttcctgaaacgtgattttccggataaagctgtccaggctcacgccgctgtatgctttcgcataaccgttagtcggcagcgtatggttggttccggaagcataatcccctgcactttccggcgtcaatgagccaaggaagacggaaccggcatttattacacgttcagcaacttccagataattttcagtctctacaatcagatgttcgggtgcgtatgcattcgtcaactctaacgcttcatccatgtccttcaccaaaatcagtttactgttttccagagatttcgcagcaatttcccgtcgaggaagctttgccagttggcggtctacttcttccattacttctgcctgaagcttttcagaggttgttatcaacatcgcctggctgtccactccgtgttctgcctgcgacaataaatctgccgcaacaaacaccggattagcagatgcatcagccagtacttccacttcggaaggacctgccggcatgtcgatggctacatcccgaagacttaccaattgcttggcagccgttacatattgatttccagggccaaagattttgtagactttaggaacactctcggttccgtatgccatagcagcgatagcttgcactcctcccgctttgaatatcttactgacacctgccagttgagcggcaaagagaatagccggatgaatatttccgtttttatcgggaggggtacaaagtacgatttccttgcatcccgcaattcttgcgggaacagccagcatcaataccgtagagaaaagcggagccgttccaccgggaatataaagccccaccttttcaatacctaccgccttttgccagcaagttactcctgccatcgtttctaccttcttgccaacaaagcgttgagaagagtggaaagtttcaatattccgtttagccagcgtaatggcagatttcaactcgtcgctgattagtccttcggctttctgtatttcttcggaagtcacagtgagagcagacaaagtcaccttatcaaaagccgcctcatatttcaaaacagctttatcaccttccgcccttaccttatttataatagtacgaactgtatcgaacaagctctccgtattcaaagccggacgcttcagaagttctgcccattgttctttggagggatatttgattagtttcatcattcaaacttattagactatcattttttcaatcggcaacaccaagataccttcagctccgagtcctttcagtttgcctatgatttcccaaaaacgcttttcatccagtacagtatgaacagagcaccagccttcttgtgccaatggcataatagtaggactcttcataccgggtaacacggcaattatctcttccagtttatccttcggagcattcatcagcacgtatttcttgtcttcggcagtctttactgcattcattcggaacaaaagttcttccagtacttctttcttctcatcgctcatgtttttgttgccaatcaacagcgcttcggatttcatcactacctccacttccttcaaacggttgcttaccaaagtagatccggaacttacgatatcaaagatagcatctgccagtccaatgcccggagatacttctaccgaaccggtaatgacatgtatctctgcatttactccgttcttcttcaagaaatttctcaaaatgaccggataggaagtagctattttctttccattgaaccatgacaatcccggatattcaatgtctttcggcattgccaaggataaacggcatttgctgaatcccaatcgtttgatgatttcagcatcttcctctttttccataaactcattctcaccgacaattcccaaatcagctacaccggtagctactgtttgcgggatatcatcgtcacgaagaaataaaacttcgataggaaaattggaagactgcaccaacaaggtacgcttcgttgtactgattttaatatccgactctcctaaaagtgccattgtctcttcgaagagacgtcctttggcttgtactgcgattcttaacatgattttatttattactttatgatttacaattcgaacaattcagaaataaaaaaaggcttaccgtattcggtaagccttcgttatctttatagagttatacacactatcaatcacgcccaccgagttattcgttaggaaaatgatgatgatgatgtgcagctgtatatttcatatttcttttatttaatgcgacaaaagtaaagcatttgtttgatacttccaaacatttatcacaaaaagttcagtttttatttcaaattaaaggcaatatctcttccggctctacatcacacttatcaaagtgcatttcatctttcgacttttcgtgcgagaacgtaaagtacgtacaaaccgcttcggtacatacttcgccatccttattatataacttagcttcaataattacaatatttcgcttgacttccttaatagaagcacgcaacacaatatgggaatcagtagtactgaccggcttgcggtaacgagtctccatttttgaagttactcccgttgtctgtaatttacgaagtatcacccaagcgcaaatttcatccatgagaacagcctgaataccaccgtgcaaggtattgatccatccctgatattcaggacggggtttccagatacttaccacttcgtcgccatcttcataaaactccatctttattccggcttcattattaggggcgcaaccaaagcaattgtacccttccagacctttccagggatttattattttcttcataatctatgacttctatttaagtttcacttcccaaatataagcaaaatataaaaaagaagaacaattttccacgatttactttcggatgcaacgaatggcgtaagctttatccaacccggtgtttccctctgctatttcgtttttatcacttctcaacaagaatattttctcatccgcatctgtccctgcttcattcaaagtccaataagaaagatattttccttcataggcagactgaaacttgccggcatacattcctaccggatatccatcaaaccccgtgagattggtagcagttcctactattgcaccggcaccggtacttattgctttccatgtcccggttttcaacaaagaggcatcattgctcaaataagttttcagcatattccaatcattccaatcaggcatattccaccccacaggaagcagcttattactgacaattgttccaaaactataaaaataataactcttatctgtttgagacaatagataacctgtcgctccggcattcataatctccagtttcggaatttcttctccatctatatataatgatgttttcagattacttcccatccaatactgcgtaccaattttcactatcgggtaattgtgaatactactcccacgcacatcacgcattatatctttcatggccaatacgggcaacatttctttaggcatagacaatgctatttgtccgtcaggcaaaatatacaccttacttcgggcagcctgatttccaggagtatatttcaatgaatgttctttcaaatcccacgctacagttccaccgtgcactttatctgcatgtccgaccaattgtactaccgttcccttggataagtcaaccgcatggttatctttcatcggataaacgacaattgcctgtgaagaaaaatcaggcgtcactagatattctttacatatttctgctacctgctgcccagcactcaacactttatacaccttcgaatcgtcaaataccaattttgacacatccacataattatggaagacttcggacccggactgccctgtatttccatcttcccaactattgatttctccttcgactttacttatcaaaacatcttcggtcgggatgaaggaaatcgccagctcactctgcttaccactctgcaactgcaatgaagagggcaatgggctggtatatatcttacctccaacatccaatacgatatattgatagcccaaagtggtttcctgcggaataaggatcacttcttttccgctcaaccgatctccctgtatctcccattttccggcaggagtaatgcttttctcattagaaaaagcggaataagtttctttttggaaatcataaatcgccttagtataaaaaccacaaacagaaagttttgggtcagcatccagtataccctgcaattcttcaccttcctttcctaccaaagcgatttttaatttgaaaaatttgtgatcatagtgcagggcgatggctcctttaggagctgattgcagattttgagaagcaaccagaaaatcagagcagaaatagccggcagaaagattttgatctgtttctaccgccaccgacatcgtactttctcccatattcactccctcttcctgataaggataataactgatcaaacgtaatgttacctcatcatcaggataataaatcggctcactggactcaaaaactttttcggaagtacgaaagaaacgcaaattatccgcataacgttcttccttcatggtggaggaccctacaagggcaaatactcccacttcatcattctcttcaaagccattgccagcaacacgtgtatatgtcacttcatgaatatcagctgtaaatttcaatggaatatctccattgctgactgcagccttctctcccggaatatgatttacacatgctaatacaaaaaaagaagaaaaaaggcacacagcgattcctttttccattctaaacaaaatattcatgtcctctttatttaaatataaataataagaaatctttgattgggcagaaagaaggacataagaggaagtattcactttcagttatgagattccacacaacacgtctgttgcgactggagaatcatcaactccaacatttcattctgaaatgccaaaagcaaaagtataaatcataaatcaaccaatacttcattttcttaaataatatttatatttattcataagtatcaaattagtagcactttataaatcagggatatttcaaaaccaaataggcttacacattattatattagtaatctaacattttcaaaaagaatagcctatttctaccccggcaatatgtttaccttttggagactcatactgataacaataaaaaacatctaacgcccatcgtttagccaaagctatctctactccaggccgataacgcatacgatctgctctccaaaaaggagcatcatccaaactttgataaatttcaattgaaaagtagggggaaacgattcctttttcgggcgcataagctaattttaagcgggaacgaaggcgagcttttgaatcaccacggtcaaaagtttgctgaaacctttctctcaaaacaattttcaaccactgattttgaaaacttgcagttgctccaaagttataacggtgtctgaatttccattccgaatctcccaaattccggaaatgagtttcatatccggcttccagtttcaaaaatgaataagcccgatactcgcctccaatggccaatcccaaacggtccattctacttacgtcatcctttgtccgaaactccagattgcttaaaagtgaaaatcggggatcgatcttatagttcactttgaatttagtccatgtagtgaaatcatcgctttgcgcaaatacagtggaagtcattccagccaatagcacaaacagcagtattttagtaattgcaaatattctactcatcgattaccgggttaaaagtacaaagataataaatctcccgcaaagaaaaattatgatactgaaataattctgaaatatcaaggctcattcctttaaaagaaacaccccgttggttttaaaggaacaggtcgttggttttaaaccaagagcccgttcctttaaaagaaaaagtccctattttatactccgctgataatcaatgatttatttttgcttcgcattccacacccataaagcgaaaaataccgacaatatagccgatccgatccaaaaccaattgatataagtaaagtcgtaaacctctaccccactccggatcgttttatgtccttcaatcaaaactccgctcatgacatcttgcagcccagctccgatataactggcaattccaacaactcccaaagcagctcccgaagcattgcgaggagcaatatcaacagccatcagcccacctaagaaacaaatcagtactccgatgcccagtccaaagaggatcattgccacagcatcgagccaaaagtgtacccctggcactaataagaacaaacataatgctaaaacattcgtcagtccgaaaatcaaagccggaacattacgccggccaccaaacagtttatcagaaattacaccggaaaacatggtgccgataataccacaaacagaactaatggaaataatgaaactggcatccaaagtggaatatcctttctgtgcttccagataaaaaactccccaactgtttaccgcatatcggctgatatacataaatgcacttgataaagcaaggattcagatagcaggcattgtcagaacctgccgttgagctttattaaaatctgtcgtttcggaagcactcatcgttttcttttctttcgggacattgaccggaggaaagcccttgctttcgggactgtcatgaaaaaaacgccatacaattaatgcccccagcaatcctaccatacccgccccaaagaaaccataacgccagccgcaaacactaacaatagatgctacaattataaatgtcagtgcttcaccaatattatgactggcggaccaaaagccataataagagccacgttctttatccgtgaaccaacgggaaagtccgactacacacgaagcagcccccatagactgaaaccagccgctgactccccaaagaacagcaaacaaaataaatgaatgggagaaaccgagacaaagattaatcaatgcggtaacaagcaggccggtagtcataaaacgatttatattacttcgatctgccagaaatccattcgtaaatttacccaccgcatacgtaaagaacagcaccgaaccgattattccgagttccgtttcagaaaagattccctcgtctacaatcggtttctttactacattcaagctcaaccggcagacataatacataccgtacccgaaagttgccgaaagaaaggtagaccattgcagatatttcaaccgacgcttgccagatgaagacataacgtctccgttacaaggccccggtgaagagaccttgtaaaaatttataagatgtttcagcatgaaggaatatctttagtcgtgcagtttctttttacgcaaatattcgagtaataatgccgggcggtctgtttgaatcagtttagccccctgattcaaaatccatccccagctttcatccggttggtgtagttctaccgcgcgatcgtcatcgtgacctccacaaagttcaggccacaaagaattaatgaaaagcttggcaccactatcacgtactttcctgatcaagcgaagcatttcttcattatcatctttaaataccagttcataagcagccggtttcatgtgtgactgataatcattgattatcttttccgctccttctttgtgcagattcacaataggcataaaaataaccttatcaagtacatcaccattttctgctttcactcgttcataggggagtcctgctttaattacgcaatggtcaattgttcctgttttttcaagtacagcataagcttcctgaaaataatcgtaacctttatcgatattcaccattatcttccctttgcaaagtaacataacttcttcgagagtaggaatctgatgtctggttttacagcctgctccatttttaagtcgcattgctttcagttctgccagtgtataatcctcagcgtttccttttcctgtcattgtacggttaattgtcttatcatgcatgacgaccaagtgaccatctttggttttcttcaaatctatttctaccatatccactcccatatcaatgcaattccgtattccttgcaatgaattttcgggagcatttcgccaatcggcacgatgagaaacgaccaacactctatcggaataatttcctaacaggttttctctgatttccgcaatccgattttgagcaacagccagttgcaccaggcatacaagcaatataaagttataaattcgtttcataaattcaaatattaaaattattagttcagcttaccattcttccagaccatcttttctccccacataggcacataggtctggtcacagttaatcttggacgcccgttctagtgccatgtccaatgaccatctggatgcatcaacacctgcatgagccatttccagaatatgggataacagaacataatccggctgtacctgtcccgctccggtacctaaaatattattctcagtcagcgcattaggagcatagcggggaatcaagacattgacatgtggcgcaatatttgtatattgttccggtttaaaattggaatcaccgacatgcataaagacgaaatttccagtatcgtccccacagtctatctggaaaatagttacgaaatttgataatccggaattattatgatcggtaatacaagtacggattttaaatttacctatttcataatctttatccccctttgccgtgtagggataagtggtgtctttcaaataattggataataccggcttacccaaatcaaacattgcctgaatcaaatctgtattataatgatcagaatgcttatgcgtcacacaaaggaagtcgatatagggtgcaagttccttcgcccagcgatgagaaatatcaatagcaaaacatccggaaggagtcttaactatatatcccatgttataaagcaaccagatttctgctgtgccattctctactttggagtttttaattccgtccatcacccggtcaaaagcactccggtaatagtataagatcggttcactcttctccatactcatacttgcctgatcaaaaccattcagaaaactgataaaatagtcatccagacatttatcggcatatccctgaatagtgctcaaagcatcggcacgttcagtatttacaattgatggagaagttccccataactgttgggtagtggcatctacctttgctgccagttccgtaagaattccttcgtacccggtcttcttatcattattatcatcgtcactacaacttgcaagtcctattgccagcaggcaaaacaggaaatattgtattcttcttatattattcatattatttcagtgttttatagtcatcagttattttatcgaaggtctctgcaatccgttcaagagcaggtctcacattattattttcgtgatccttcgtcgcttcatacatgaaaacgcctttatatccggtcttctccaaatcttgcatcaactttccccattttatatttccctgtgtaggaagccagtggcattcgttcaccaaatcaaaatctgaagcatgtatagtgccgatacggctacctactattgccacaaagtgctctgtcgtgcctttggtatagtgatttgtatcaaagcacacttttacgtccgggatatctccgacaatcctcataagttcctccggagtatttcccaaacaggttctgggcagattctctatacaaagttgagcgccaatcctatcagcatatttcttcaaataagcaatagactccgaagcattggcaatccgttgcgcccgaatactatcggctatcggttccgaacttggatgcaaaaccaggcaagtcggttggaacatggcacacaattctatcatctctgccataaaatctacattttccttccttaaccgatcatccagaactgagatatccagcgttcgggagaaaggaagatgaatagaccagacttcaatatccgcactgtctatcttcgctttcatttcctttatacgtggaatcacttcatcgacaggaactcccctataacattgattaaaggccacttcgacatacttcacaccagtcgcttttgcatgaaggaagtcggcagcagcaggtgctttccacactgctgtcgtagtacctacttcatatttctgtgcatatccacaaacagacatcaccataaatgcgataaaaatcaattttctcatcaccgtttatttttgtcggtttgtaccttgaatatctccaccccgtatactccaggagtctgtttccaacgttttattaatgtcaaacgcttttatagaacctatattgctcgctccaatagtaccacaataaagacgcttgtccggaccaatcgaaacggatgccattacctgttgacccacagattcttcataaacagtacttccatctgccgtattaagtccgaaaatcttattatttgactgcgttccgatataaagaacaccatctgtactcaacgcagcaccactgtagttcaggttattatttaccttcttcacccatacttttgaaccgtcagcgtctacagcgtaaactgtttgcgaacctttctctgtaaaataaacaacacctttcttatctacgatagggaaataagcatcaccgcctgttgtcggataggtccattttttggttccgttcgtgatatcaacagcaagaagtccagcctttgacttcaaagttgcgtaaagcgtgttgccattcaaagcaaaagttccctgctccgtcacattgacaccactgagtttccaaagttcttccttatttgcgctgaaagcataaatagcttcactggtacctgcatagatatgtccgtttctatcaatagccaccgcacttcctgttgttccatcaagagattgttgccatttaatcgcaccattcgcaacatcgagtgcatataacgtacttttattagtcaaacaatagagtacaccatcagcagacaaagcagggaacgcacctatcggtccgtctaattgcaatgaccatttctgagtaccattcggatttatggcatacacattcttgatagaagcatctctcacgcactgatagatagtaccgtcaggccccaccaatgcaccgccgccataagttattttatcaatggcaaatacccatttgaattcaccgctgactacatctaaggcaaacaaatgcccggcaggcgttgaagtcggaatatacatcgtctttccatccggggagaatacaggattggacgtcttgacatatcctgttaatccgttaaagttcagactcatactatcccatttatatccgacaacattaatttccacacttcctgactccgtcgtattattcgtatatgttactgtgatagtaactgtataagttccagtagcagcaaaagcatgcgatggagtcgtttcagcagaagcagcaccatcaccaaaatcccagctgacggatttaacattgccaccagtaaaatacatatcgttataagcaaagacagcagactcccagacaaccaattccgtattgactgctaccggataaataattcccggagtagccaccgcttccgccgaaacagaattccccatcggataaatgcaaacaacatcaaacttatactcctgatcattagtcaacccttcaaccatatattcttccaatgttgtgtcatccaatttgataacctgattgccgggacttacggtaatctgataattcgtaaaccgttcgctgacaggcttcgtccatctcagccggactttcttgtctcccgctgacgcagtcagaccagtcaccggatatcttgcattctttggcgtacaagaagcagatcgcttactcgccagtcctccggtatagcgaggttgtacggagaatgtataagcgacatcattgacaagatcactgacagttgcaccggaagcctcagcctccacagtcatttgccctccttccgctcccgaagagcccgaagtccagctaataagatattcatcaggacgggcgtccggatatgcttcccaggaaagtgccacattcatatctccggccgttgccgtaagcgtctttaattcatataaatcaaaacttgcttttggcagttcttcatcacaagctgcgcaaactgccgtaatgacaaacaacaagctatatattatttttttcatcgtctgaattctttaagtttaaccatattaataccccggattctgccacaacaactcagtattgttgattctttccaattccgttttaggaataggatacagaaactggaaatcctgaattgtatgtccctccgctttcatagcttccttggcacctcccatgcgaacaaggtcaaaccaacggtgtccctcataaggaaattcctgttggcgttccagcataatggctttacggaaactatcctgatctgccagttccgtaatctgaaccggagataatccggcacgggtatgtaccgcattcaaagcaaccattgcatcagaagtctgagagttgctatagctgatttcgttcagtgcttcggcatacattaacagtacatcggcataacgaagaataatctgatcgttaccgacggtattgtatgtcgcacttttcaaatccttgaatttattcattacgcagactttatcttctactttcacataagtgatcaggtctttgcgtttatcaccgtctttatagcactccttcaaagcctttgtctggttagtatcatctgtcaggttgataattgaaaaccaatagccatgtccttcaccctcaacgtccttattaaagcgcactgcgaaaatgatttcatcgttcattttattatcgacatcaaatactttatccggtgtgggcatcaaagaatatctgcctatcagttgcgaaagtacattgcgtgcctctgtccacttatggaaagtcagataaatctttcccagcaatgccattgcagcaccggaggtcgcacgtcccgtatcagtacccgtataagaagaaggcagcatattctcattgataacctgattcaaatcgccggtaagaaaatcaaagacctgctgctctgagcttcttccgattttaagagcttcagccaccgtcaccactttatcagtcatcggaattccaccccacaagcgatacatattaaaataagtaagagcacgcacgaaaagcgcttcccctttatattgtttcttcaacgtagcatcaaagtcagctgcgtctattttgtccaataccaaattacagcgatatactccgttattaaaattcgcccaggcggattccaatattccattagaggctttatccgcaaactgatctatatcataacggtcttgtgttccggcagtaggagcactcaacgacaggttgtcactccgatattcgcagcattccgtgaagtaggaaacctgtccctgcaatttagaataacagccgatcactgctacattaaaatcgtctgctgtcttgtatactttatctgtaggcacactgctacttggctccaagtcgaaaaagctatctgtacaggccactgatacaaaagcagttgccaagaataggatttgtctatatattttcatacaccgtatatttttaaggatgactaaagtgttatatttaatccaaacaagaaggttttcgccagcggatatgttccgtaatcttcacccggcgaaagtgaattgctcggacgtgcatttacttccggattgtatccaccgtagttggtagatgtccaaaggttctgtccggagacatagactctcaacttctccacaaagaaacgacgtgtcagattctgaggcaaagtatatcctaacgttacattctgcaatctcaaataagaaccatcttccagatgccaggttgaagtacggccattataacctttcgatttgcggttggcacggttcacctgaccatttccggggttatccgcacttttccagcgattcagggcaatcgtggtaccattggtgtttccttccaaattatcaatatagcgacgattcagattcagaatctcattaccgtaaactccctggaagttaaagtcaagatcaatgcctttataccatactttaccaccaaatccataggtgaagtcgggcatatagttacctactatcgtacggtctttgtccaagtccatcacaccgtctccatccacatctacaaaacggaagtctcccggctgagtattgctgaaatgaggatatttcttcaattcttcttcgttggaaaagataccgtcctgcaccagcaaatagtaacatccgatcggttcgcctacttttgtgatataataagcatgatctacgcttccggtagagataatgggagcatttcccggaccaagagcttttacttcattggtattcgtagcatagttggcattaaaagaatacccaaagtctttggtgaaatttttctgagatgtcaaggctatttcccaaccacggttatttacttttccaatattcatcagggcagtgctgtatccggtcagatgaggaacaggaacattcagcaacatattggaggtattggtattatagtaatcaactgttatccccaataatcctttgaacatttgcaggtccacaccgacattgaccattgcattcttttcccagcttaaatcatcattcttaatagtattaggtttatagccttgtaccagttgcccgttacccgtacccagtatataattatcaagagccatcaatgatagatgatcgtagttgcctatctgaaagttacctgtaacaccataactggttctgattttcaagtcatctacaaaggagagaaatttcgccttcgtgaagaaatcctccccgctaactctccatgccaatgatgcggacgggaaatatccccagcggttattttttccgaaacgggaagaaccatccgcacgaatagctccggaagccatatatttacctttataactatattgcacacgagccagataggaagcaatcgaccattgggtcttatcagacgccccctttataactgttccaccggagatcgtctgtatataatcattcggaaaatcggtagctgtcacattatctcctttataagtttctttttgtgcagattgcaccagaaccgcattaatcgaatgatcttcattaatcactgtattataattaatcttattctcaatcagccaattaaaataaaaaccggaggagctgtatgcagtagggttcgacttgatatcataatatttctggcccagtaagggtagttctgacgaacgatactgatcattatgagaaccataataatcaccaccgaaagaaatattataagtaagtcccttgaaaagttccagttcggcaaagactttccctacaattgccatacggtccactacgtccgattgcagattggccattgccacagggtttaataccgcattgtgctgatagtcattgccaattctccaatagccatttccctgatagttataactaccgtcggaattatataccggccacacaggaggcatcatcaaggccgactgaacaataccattcgatccggaagcatccacccgattggaagtcgaataagaaggagagaaattaagaccgaatttcagtcttttatattttccgtccagattcatacgcatgctatatttcttgaaatcagaattgatgataataccttctttatcataataattggcagaaataaaataaccaacggtctttcctctgccggagatagaaatattatggctggttgtagccgcactacggaaaattgcatcctgccagtctgtgtccgttaatccctgatcgccgttcagataaggaaaaagttctgcaggaatccgttcccatgaattcggacgcataccattagggtcattgggtgaaccaccgggattagcatccagataagaattatcatgcccgtctttggcaaactccgcaaactgataagcattcaacatcggaagttttttttgaaacactctggataccataatatccatcatattgtactttcattttttccgactgcccttgtttggtagtgataataattacaccatttgatccgcggctaccataaatcgcagcagacgaagcatctttaagtacctctaccgactcgacatcattattattcagattggcaaagccacgctccacaggtacaccgtcaatgatatagagaggatcactccccgcattgactgtactgataccacgaacacggatactgacacttccttccgggtcaccgctcggctgagtcacttgcactcccggcatctttccagctaatgcctgacgaaagtcggaagcagaaacctccgcaatctgctcggctttcacggaagagatggaagtagacacatcccgtttccgctgtacaccatatcctaccactactacttcatcgatcatcttgctgtcttcggtcaacgtaatcttagccgtattcttatcttttgcagaaaggctgacggtcttatagccaatataagaaattgtcaatgtagccgattccggtacattcatcaacgaatatcgtccgtccatatcggtaatcgtaccactgccctctcctttgatctggacactggcaccaataactggctctcccttatcatctacgaccactccctgaacggtacgtgtacgttgagcgctttcttctttaagcggctgtttactgacagcaattgtattatcggtcctattgaaataaagttttgactgagtagttatcactcccagaatttgtttaagcgtagcgttttttacatcaaaagaaacatgcggagcgttatttaccgtttcctgatcgtagataaatttaaagttggtctgttcactgattttattgaaaacattttctaccggctcgttttgtacacggagcgtaatgttgttctctttcaatgtctgagcagcagtcggagcaactaaaaggaaggtgaatagtaaaaaagctaaaaacgagcagctatttctactttttcctttacaaataagaagattattcataaatttgtgcgttttagtaattgactaaagttattaaaaacaagcaacgtgcgatacgttattcatttgggtcgaagcgaatgaatatccgtccgggttgcggatagaagcattccttaggagtgcttctatctttttagggagtttctatgagggtgatgctttcattctgtccttattaacgggttaaacattgatctattttttaattctcattttttataaagaagtatattcctgccttctttcttataattgatatcactgataaattcgatggatttaagtacggactccagactcttattgtcatgttcaccggtaatcagattatcaaattcctgtccggaagcaaaggttatctgacaattataaacacgttccagttcttttgccacatcccggatcggagtactgttaaaacgcaggcttcccttgatccagactgctaccccacgttcttccttcttcttactatattcaccggaaacggtatttatcagaacttgttcttttgcagtcaatcgcatcattgcttccggcagatcaacctgtactttgccactctctacacttactgatacgatttcatccgtagagtaagattttacatcaaaccgggttcccaaaacacgaacatccagtcgcttcgtctgtacaataaacggcatatcttcattatgggcaaccctgaaatatccttctccttccagttccactttccggatatccccttgaaaagaatcaggataacgtacttgtgaacaagagttcaacactaatatagttccgtccggtaattccacccgtttcttctctccaaaagaggttgagatttcagcgaaagttatctgctgctcactcatataccggaaataactgatacttcctgtcacgatggctattacagccgccacactggctgcaatcgtcattacccgacgaaaccaggtacgtttcttatgttcaatatgtttcagcaactggcgagcctcctttttatacttctcacgctccaagtcagtaacaggctgctggctgacggattcctcccagacttcggcagacaactcatccaatatatctttatggtcagcatctctcatactttccagtaactgcgatgcttcctcccggatgtacatatcatccagataacgacgtaatttatttttttctgtcttcgtatctttcatcatatattcaaataagggtgctgatttctccccttcgtattagtaatacacaaaggcaggaaacagctagggtatgattaacatttattataaattcagacaaagtagaatcagcaatatgtcagcagaagtacccgaatatttagtcaagtaggcacgaatcactttcaacgaaacagaaatatgctcctgtacggtattgacagagactcccagcgcttccgcaatttctttatgggacatctgtaaatctcggctcatattaaagacttcacgctgacggggagtcaattgttccaatgcacggctaaggacatccttcaaatcatcgaacaatattttattattcgtttcattggccgaatcaaccgcatgagaaaggatatgctctttcaacttatcttcattcgccatatcccgtatctgattaaggatacgattgcgtacaatcgtatataaataggatgagaaagacgcatccggattgataaaacgcctgctttgccatacaaccgtaaacgcgtcctgaaaaatatcttcggcaaactcacgagatttgacgaacttcatcgcaaaatacagcaagcgattcttataggcggcatagagttcgcaaaaggcatcctcatcgccgtctatcagacggagaactaactcccgttcgtccataagcgtgtctgttgcgtacatattttctttacttttgggcacaaaggtattgttatgatgttacaaacgtatgtattttttctgaaataaaaaaataaccttctttcttattgagtttccggccgagaactttgtgtactctttaattgttgtcctattataaaagtgcgaacaaagcacacaacaaagttctataaaaaagaaaggaagattatgaaaaaagtaatcgacagagcttcatcaagaggctattttaatcatggctggctcaaaacccaccacacattcagttttgctaactattacaatccggaaagaatccatttcggagccttgcgagtgctgaatgatgacagtgtagacccgtcgatgggatttgatactcatccacataaaaatatggaagtaatttccattccgttgaaagggtatctgagacatggcgacagtgtacaaaatacgaaaacgattactcccggtgatatccaagtgatgagtacgggcagtggtatctatcatagtgagtataacgacagcaaggaagaacaattggaattcctgcaaatatgggtattcccccgaatcgagaatacgaaacccgaatataacaatttcgatatacgtccgctgctgaaaccgaacgagttatctctgttcatttcaccgaacggcaagacaccggcctccatcaaacaggatgcctggttctctatgggagacttcgatacggaaagaaccatcgaatattgtatgcatcaggaaggtaacggagcttatctgtttgtgatagaaggagagatcagcgtggccgatgaacatctggccaaacgtgacggcatcggaatatgggataccaaaagcttctctatccgtgctactaaagggaccaaacttctggtaatggaagtacccatgtaaaaaacattatttctagttttattctattctatttaaatgaagcggtcccactctacagagtgagaccgcttctcattgatagttatatcttcggattatttttccttccgataattctccagtccagtttgcaggaattcaatatatttgggaatgtcttcatcgtaagcataagacttattcaaaggacttccctgattatccagcaatacatagaaaggctgtgcattagcaccaaacttcacacgttgcagatagctccacttatcaccgactgtacgcaaagtacgttccttaccgttctctacgattttcacaggttcggtcaacggagttttattatccacatacagagtaatcagcacataatcattattaatcagatcactcactttcgggtccgtccatacagcggcttccatcttacgacagttcacgcatccatagcctgtaaagtcaagcatcactggtttgccattcagacgtgcatactccatacccagatcgtagtcatcgaatttcgcatgtacttcattcttatacagattaaagtcttgcgtatgcataggaggagcaaaagcacttacggcttttaacggagctccccacaaaccgggaaccatatatacggcaaacgccagagagataagtgccataaagaaacgagtcactcccaccttattgtcatcatcgtcatgcggaaacttgattttaccaagcaaatagaaacccagcaatgcaaaaatgacaatccacagagcgaggaaggtttcacggtcgagtaatctccagccataagccagatcggcaaccgacaggaatttaagcgcaaatgccagttccagaaatcctaacgtcactttgatcacattcatccatccgcccgacttcggcatagacttcagccatgacgggaacagagcaaagagtgtgaacggcaatgccaatgcaatggcaaaacccaacataccgatagccggagccaccacgcttcctgtagtagaaacctgtacaagcaggaatccgataatcggacctgtacaagagaaagataccagtgaaagtgtaaatgccatcaggaagatactcagcagaccggtagtcgattccgctttactatctaccgcattgccccactttgacggtaatctaatctcaaacgctccaaaaaatgaagcggcaaagattaccagcatcaggaagaaaaggatattaaagacagcattcgtcgataaagcattgagcgcactggcaccaaatatcagtgtgatagccaatcctaatgccacataaataacgacaatggaagcaccataagtccacgcatcacgaatacctttcttcttatctttgctacgtttcagaaagaaactgactgtcatcgggataataggccatacacaaggagtgaacagagccagcaatccacccaggaaacctgtcacgaaaatataaatccaggacatatctccctgagtatgttcctcgcccagtgcctgcaattcactgattaccggacgccaaaggtcaccggaagctacagctggttgaatatcggcatttgcatccgtagcagaagcaggaaccagttccatcatcgcagcagagtctttggacgcagcaggagcagttacttcttccgcctcttttgtctccggcttatcagctttggctacaagagcagccgtagttccggcctttgcttcacccgagaacttaaaaggaacttctgtcggaggcagacaactctcatcgtcgcaggctccatattccagataaccttctatcgcataagctccaccagtcagcttcactttctgcacgaatttggcagtattctcgaaatagcgcactttcatttcgaacagtttgtcgaaagtagctatttccttgccgacaggcttcaatttacctaccagttctacaccagacttcttctccacattaaatgtggcagaaataggtcctccgtctccaagatcggtagaataaacatgccaccctttgtcaatggcagccgtaaacacgatctccgcttctgtatcagaaagagagttcagttctgttttaaactttaccggatctttaatctgcgcctgcaatgtataggctacaaagcttaaaagcagaaaagaaattaattttctcattttcattattgggggttataattcataatccacgcatgcacgactgtcctttgcttcagctataatctttccggctgccacatgatcagggtgtgttgcatagaacttcacatcctccagcgtgtcaaattcgctatagagagctatatgccaagcctctcccggattcatattcagtccgacttcaatcttacggatcactgaaatcttagcggggagcgcttcgatagcttccttaaatttattcatcactacgagtttctccgcttcgggaacttcgtcttttaacttaaataatacaatgtgtttcaccattacgttgttattttaatgaattgtttctatatttgtcttgtcaatgcattacattactaatgcaaaattactctatttggttcaaataacactataaagagatgttaataataggaatagcaggtggaacgggctccggaaaaaccaccgtcgtacgaaaaataatagaaagcctccccgttggagaagtagtactattacctcaggattcatactacaaagacagtagtcacgtgccggttgaagaacgtcagaatatcaactttgaccatccggatgcttttgaatggagcttgctttccaaacatgtgatgatgctgaaagaaggaaaaagcatcgagcaaccgacctattcttatctgacttgtacccgccaaccggaaaccatccacatcgagcctcgtgaagtcgtcattattgaaggtatccttgccttgtgcgacaagaagctacgcaatatgatggatctaaagatatttgtagatgccgatcccgatgaacgcctgatacgtgtcatccaaagggatgtcatcgaaagaggacggacagcggaagctgtcatggaacgctatacccgtgttctgaaaccgatgcacctgcaattcatagaaccctgcaaacgctatgcggaccttatcgttccagaaggcggcagcaatgcagtagctatcgatatattaacaatgtatatcaagaaacatttgaaaaatgaagaatgaaagataaagagttcagaatgagtgccaagacactgatcctccccttgtttcttatacttttgtgctgtgtattcggatgccggaacaaacatcataccgaaaagaatgaaacagcacacgatcttccacagattaaagacagtggagaactggttgtgctgacactctatagctctacttcatatttcatttatcgcggacaggaaatgggattccaatacgaactcagtgaacagttcgctaaaagtctgggactgaaactcagaatcgaggtagccagaaatgtccgtgaattgattcagaaattacagtcaggcgaaggagatatgatcgcctacaacctgccgattaccaaagaatggaaagacagccttttgtattgcggagaagacataatcacccatcaggttatcgtccagcaaggaaatggaaagcataaaccattgaaagatgtaacggaacttatcggcaaagatatatatgtcaaaccaggcaaatattacgatcgcctcgtgaatctgaacaacgaactgggaggtggtatccatattcataagataacgggagatagcgttaccgcggaagacttaatcacccaggtagcacaaggtaagattccctataccgtagccgataatgatttagccaaactgaataaaacttactatcccaatctgaatatcgatctttctatcagttttgaccagcgttcttcatgggctgtgcgaaaagacagtcccgaactggcagccgccgccacaaactggcataaagaaaatatgacctctcctgcctatacggcaagtatgaagcgttacttcgagaatagtaaaatgatgccccactcccccatcctttcacttaaagaaggaaaaatatcacattacgacgatttattcaaaaaatacgccaaagagatcggatgggactggcgaatgctggcatccctcgcctatacggaatcaaactttgacacaacagccgtatcttgggcaggagccaaaggattgatgcaactgatgcctgccactgcacgagcaatgggcgtacccgcaggtaaagaacaaaacccggaagaaagtataaaagcagccgttaaatacattgccgccacagaccgaagtttcaatatgatccctgacaaacaggaacgactcaatttcatactggcttcttacaatgccggcctaggacatatctacgacgccatggcattagcaaaaaaatacggaaagaataacctcgtatggaaagacaacgtcgaaaacttcatcctgctcaaaagcaatgaggaatacttcaccgatcctgtttgtaaaaatggatatttccgtggcatagaaacgttcaacttcgtacgtgatattcagtcccggttcgaatcgtacaaaaaaaagataaaataagtaataagtaataagtatcaggtaataggtaataaccgtagcttatcaatagtgtatccgcacggcttattacctattacctattacttattacctatttattacttgtttctgcccgtcaaaaggctaaccacaacaatagccagtatagacaatggtaatgcaaagagaatagggtcaattaccggaaacggatatgtctcaatcaatacatccttgccaaacaggaatttacatattcccattgcggcagcttctttctgatgaaggaatattagtgcaaaagcactgcctaaagttcctacccagagacttgccattactccctgtttcgtcgctttcttccagtacaatgcacagaagtaggcaggaagaaatgcagcagcacagatacccatgaaaatagaagttccgcgggcgataatatcatgtggcagcatatagcaaataatatagctgaccaaaatagagaaaagtactcccaaacgaatcacatttgtcaatttgccacgagaacggggtttataagtaccataaatgtcagaaccaaccgatgctcccattgtgtggaactgagaactaagcgtagacatacttgcagaaaggatacagagcataaacaaagcggcaaaccagtccggcatagctttattgatgaaataaggaatgattttatcaatatcctgtatcacttccgtagcaacggctccttctgtcttcaagaagaaaagattgcttaatgcaccggcatgatagatagctcctaccgttataatcaggaaaaaacaaccgataaatacgccacgattcaactgtttgctactttctaccgtcataaaacgtaccaccaactgaggctgtgcaaggcaaccgattcctactcccaaaataagagaggtaaccaatgaataccactgcggagaacctgtcacaggcattgcggtccatccctgatgccccaatgccttgaacttttccggaaccagaggggctatatttgtcaattccttgtttgcttccgtaaaacccatgccaagcacctgatacaaagagaacaacaggaacaacatacagccaaacatgataactgcctgtaaagcatccgtatacatcacccccttcattcctcccgcaatcacatacgcagcaatgactaacgtaaatatcagcagagatatattaaaatcaatctgaaaaatctgttcaataaatacagcgccccctttcattaccacagcagcgtacaacggcatacctataaatatgacggctgcaatgaacacctgtatattacgggaacgaaaatgacggcctaataactgcggaaaagtgctgacattcagttttgctcccatgcgccgggtacgcaaaccgaagaatatgaaggcgataactaccccgacaaacatattgaggaaacacagccactgaatacccataccgaaagcagccgctactccgccaaaaccaactatagcagacgcagagataaacgtagcaccataagaaagcgccatcactatcggattcatctgacgtccgccaaccagataatcactggtattcgtagtcttcttatatcctaaaaaaccgaggtaggccaatgacagcagataagctatcacaatcaagccaagagtaaatgtattcatcgcgtttcgtctttatcgtcgtccttattccaatatttcagcccaaaccaggcagcaaaaatcacacatatcactgagaggatatatggcaagactataaaagggtcatctattccaaacatttgcgtatcagattttaatcaattaagccgcaaatgtaaggaatttattgaaaagacaaaacttttgtttactaatactgattataatgtatctttttctcgtcatatttctgtttcggctgctcttttgttgcaggatagccgaaaggaatgacacaaagaggaagaatattctcgggcaggtgggtatatttgcgaacgacttccatacgatcttcatacggataagcagctgtccatacagcacccagccccatactttcagcagccagcaaaatattctgtgctgcagcagaacagtctaaataccaataaaaagaacgggcagaatcaccacagacaataatcgcattacgggcttgtgtcaacattttggcataaggaagagccgccgccatcgaatccagtttcgcacggtcggaaacaaccacaaactcccagggacgaacatcccttcccgatggagcagacatccctgcacgaagcattaaatcaattttctctttctctacacctttattcaagtaagtacgcacactcttacgctcaaagatattatccaaagcggcatttccggtgccggttgttcctttttcctcttttgaggaagaacacgagatcatagcagtcattgccatgagcatacacaagaaagaaaaaatctttttcattgtgacaagtctttaaaataggtttaacttatttttctgggcttcttccaacgatactgtttcacggcgtaatagtccgctcttctcacgaagtgcctgatattctgcatctaactcattaatcagttcggctttcatctgcgaattcaacagccgggaagcaacactggcattctgagaagcatctttcagatgtacaaccggtgcatgatatacaggtgcgatcttcagtgccgtatgcatctttgaagtagtggctccgccaatcaacagaggaatatccagtccggctttctccagttcggcagccacatgagtcatttcttccagagaaggtgtgatcaagccactcaaaccgatcatatcgactttttcttcgatggcacgctgaacaatggtttctgccggaaccatcactcccaagtcaactatatcataaccgttgcacgccattacgacggcaactatattttttccgatgtcgtgcacatccccttttacggtggcaagcagaacttttccggcagaagatgatccttccactttttctgattcaatgatcggttgcagtatagctacggctttcttcatagtacgggcagtcttcacgacctgaggcaggaacatttttcctgcgccaaaaagctcgccgacataattcattccatccatcaacggaccttcaattacatctacagctttatcatataaaggtaaagcttccgctaaatcctgttccagataatcaccgattcctttcatcaaagcatatttcaaacgctcttgtacggattcttctctccatgcatcctgcttcacagctacctgaccggaagtaccgcccatcgtttctttcaatgcttccgccagttctatcagacgctcggcagcatcgggacgacgattcaatacaacgtcctctatcttttccagcgtatctgcaggaatatcactgtagagtacggaagttcccggattgacgattcccatatccatcccttgctggatggcatgataaaggaataccgcatgcattgcttcacgaatataattattgccacggaaagagaaagaaagattactcactccgccgctgacgtgtgcaccgggaagattcttcctgatccatccggtagcttctataaagtctacggcgtaattgttatgctcttcgattcctgtagccaccgcaagcacattcgggtcgaaaataatatcatgaggattgaatccaactttatcaaccagcagacgatatgcacgttcgcacacttctatcttgcgggcagcagtatccgcctgtcctttttcatcaaaagccatcacgacagttgccgctccatattgcttgatgatccgggcatgctccagaaatacttcctccccttccttcagagagatcgagtttacgattgattttccttgcaggcatttcaatccggcttcgatcacttcccatttggaagagtcgatcataacaggtacacgggctatttccggttcggacatgatgagattcagaaaagtagtcatctcagtccgggcatccagcagaccatcatccatattaacgtcaataaccaaagctccgtcttctacttgctgacgagctatggaaagggcttcatcatatttcttttcattaaccagacgaagaaacttgcgtgagcctgctacgttgcaacgctcacctatattcacaaagttgatttccggtttcacttccagcagttcgagtccggaaagccacatacaatccggtttgggtgccggaacatgaggtttggcacctgctatcagtgcctgatattctgcaatgtaggcatctgtcgtaccacaacaaccaccgataatattaaccaatccttcctgaatatactccttcacttcatgagccatatctgcgggagtctgatcatatttccccagactattcggaaggcccgcattaggataagcactgatataataaggtgcacgcgaagccaactgttcaagaaaaggcttcaactgacgggcaccaaaggagcaattcaatccgactgaaaatatattggcatgctgcacagaagcaaggaaagcttccaaagtctgtccggacaatgtacgtccaccgatatcggataccgtcacagacaacataacagggacttctattcctgtcaccttcatagcctgtccggctgcaaagatggcagctttcgcattcagcgtatcaaatatggtttcgataagaatggcatccaccccaccttccagcatggcttccatttgctgctggtaagaggcagccagttcgtcataagacaaggcacgaaacgccggattgttcacatccgggctcatagaacaggttttattagtaggtccaacggagcctgcaacaaaacgcggtttatccggactctttgccgtatattcgtccgccagttcacgtgccagtctggtagcggcaagattgatttcgcgcacatattcttctacatgataatccgccattgagacagttgtagaactgaatgtattggtctcgataatatccgcacctgcttccaggtatttacgatggatatcttgaatgacatcggggcgagtcagacacaacaaatcattattccccttcaactgaccgggaatatgcgcaaaacgttcaccacgaaaatcttcttctttaagattatattgttggatcattgtgcccattgcgccatccagaatcagaatacgctcggatacaatctgagaaattgtctttttcattcttaccttattacattaacacctaattgtcactctgcctatcttagacctatcacgatcttatcttactattacgctataaagccatcttatcgcttaaacattcgggccatgtctctgcggtcatctttttctttaattgattcccgtttatcgtactgttttttacctttcgccaaagcaacgaccagtttcgccaaacctttttcgttgataaacaaacgcacaggaacggtagtaaaaccggggtctttcattccccgttgaattttctccaattctttcttattaagcaacaactttctgtctctacgagctgtatgattattgtacgaaccatagaagtactcggcgatatgcatattctttacccataattcgcctttcgcaaaataacaaaacgtatccaccagacttgcttttcctaaacgaatggatttaatttccgtgcctgtcaatacaatacctgccgtgtaggtatccatcaactcatagtcaaatgtagcacgtttattcttgatatttacagaaggttgtttcatctttacacattaattaagtatggctatcaacttactaaatacaatttgaatcaccgtcggacatagtattaacaaaactgatgagaaaagggtgtatttcaatcgtactttttcctccacttgcatcaatatgggagctccttcccatactacatagacaatgtagaactgaaatagccaggcaataattctaaaatcaggtaaaagtccggtcacaatctgaagcaagaagggaacaacaagtgcgtatccggcaaactgttgtgtcaacggagcattggcaggcatcccaaacattcttactcccatttcgttaattgcataggccgccagaaagtaaccaccaaacaatgccacagctacggcacaacaattggtcatcgctatttgaaaactttgcggtcctccccatccattcgtcagcaaagagccgataaagacggacaaaccgcataaaccaatcataggatagacaaaagccataaaaacttttcgcctatcctcttccatagaaatttcctcccaggccttggccggagaggaaatcaatttcattgctatattaaataattctttgtagttcaatttgttttaagtgtttcactccacgttgaatttgcggcaccatccaaagaattctttgaggagttggtctttgcatttacttttattttagttggttctactccagtagcttgtttgaatgcataaataacactagacagattatatgccttataagtagaagtatacttatcacgagtcacagtctcctctgaaccatctttaatcacatgattaagattcaatacaagttcagttgaccctgatgccaattcatcaaaatcatatgtgagtataaaagaatgcttattaagttcttctttctgcttttcgtctgtactctctacttttacccaatacataataggaattacaagatattgatcaaaaagtattcccggctgagttgatgtatcgctattaaaagtatataaaggtgcagtagcttcgttataatctgccgctttctctggtccttcagtagattttgcactaatagaagtcggagtacttcctgcataaagtgttacatcaagagtctgagaattccctggctgttgcgctgtgtcaaactgatagtaaaagaaatagatttctcctatattcaagttagacattgacaattcattcacaactaatttctgcccattagccaattcaaatgtagcaggaaaatagtttgtacatttagcgaacgcaggtccggtatatatcgtattatcatccccattcatacaagaagtaacagacatccccattaaaaccgtcattaaagctactaataaaaatttcatttgtttcataaacatattttttagagtttgcaaagatataaattctaattcacaattaataaatgcagatacttaaaaaatactgcatcgtttactttattatttttgcaaaaagttccaggtgattatctacatagctggcaaccagtgttgtcacttgttcctccatatctaaatatgcctcttccaaatcatcaaaagcctcatattgctcatacatcgccatgaattcatcatccgtccgttctttttccagatccttccggttggcatcatatatcttcttggctttatataccaatttagagaactcttccgccccccacaggcgcatcacttttgcaaaaggattatcaaagatatatccgccataaccgttctgaatcaactgacagaatccgccgaacattatttcatcacgaaaaatctgataagccagcaatgaatgctgttcacctgtcaacaacggcatcgtgtcagcagtcaattcaccaccgattatttccttatatttatcagtaaaaacctggataaattcatccattccttcgcccgcagctttctgtaaagcggactccataacttctatcatagctttgttcaataaattattcagcaaagctactaattttattctatatctatctagtaataccgctacattctcactaaaacatacctgttggcggaattaatttaattcaaacccatgaaaacagggtatctcattctgctttccgatatccgccagataattgcatgccgatatactttccctttcccggaaaagcctttaagcacatttcttttaccgttcaatagtatgcaaacaaccctataataacctgctttacaactattattgtcgcattttcaaagggagttcttcatcgttccacccaggtgaacaagcatgtctacctaggtgcacagacctgtttacaagggtacaacgatcggttcacccgggtggaacgatgaagatgtcggtaaaataacacacgaataaaggcatcaaatgccatagagataagtaacataatatataaacaacaagtaaacagcaaccaagatgctagatgcattcggcaactacttacgcaaagggcaaagaaatgaaatgagagatacccccaaaaagagtgagagatagactgaaatgaagcgattctagggagaaaatgatgagagatacctatttgaaaagtatctctcattctgtaatatactaattatatgcagattacacaaaaacagtgagaccgtgagactaaaatatttttttctttgcataggatagctgaaagaaggaactcttttaagtctatctaatgcaaaaacatataactatttatgcatgtaaatgcattcctatagccatacctattaaataaggtattaaccaaatgcaccaaacgacgatactaaaacgattaaaatgccttttcgcctcggcagatcccttcacataagtccatatcgcccatgaagcatgtacaaacatcagaagaatggcaatcgtccccgttaccgtgtggatttcatcatgcaaatgcgttaattcggcaatatgctccatcaggctggtcccgactgcatcagacaccaatcctaaaagaaagaaaataatatgccataacttcagtttcttttgcagcctttctccccatacaccgatagtataaaataccaatgcagatgaaataacgcagattgccgctatcaaataatgtatatcaacctgattgagttccataaaatttatatttcagataacaacaaagcaacgaatagatagttcgacacatagtaatctttcacaaatgcaatcccgacttagcaaacgaagaaaaaacgtaaacggatttgtcacttttcacaaaaaagtaagatatggcgatttgcagaaacaaataaatcgactacctttgtgggcgatttagagaatcgtgactacgtatttttaattatatcactaaaaaaaagagctaattatgacttattcacacgaagtggaacacatgtgtgttgtaaagaagggtcctaaccacggaccggctcccatacccgaagaaggcaaatgggtaaaatctaaagaaatcgttgatatttcaggtttgacacacggtatcggttggtgtgctcctcagcagggtgcttgtaaactgacactgaatgttaaagaaggcgttatccaggaagctttagttgagactatcggatgttccggtatgactcactcagctgctatggctgctgaaatccttccgggtaaaacaatcctcgaagcactgaacactgaccttgtttgcgacgcaatcaacacagctatgcgcgaactcttcctgcaaatcgtttacggacgcactcagtctgctttctctgaaggtggtttgattatcggtgcaggtctggaagacttaggtaaaggtctgcgcagccaggtaggtaccctttatggtactctggctaaaggtcctcgttaccttgaaatggctgaaggttacatcaaaaatatcttcttggataagaatgatgaaatctgtggatacgaattcgttcacatgggtaaattcatggatgaaatcaagaagggaactgatgctaacgaagcattgaagaaagttacaggtacttatggtcgtgtaacagcagaacagggagcagttaaacacattgatccacgtcacgaataatataaggaggaaagaaactatgattagagaagtaaaattcgaaagccaagaccgtcgtatcaaaggtatcattgaagccttgaacgctaacggcatcaaagacatcgaagaagctaacgcaatctgcgaagctgccggacttgatccttataaaacgtgtgaagaaactcagcctatctgttttgaaaacgcaaaatgggcatacgttgtaggtactgcaattgctcttaagaagaactgcacaaacgctgctgaagctgctgaagctatcggtatcggtttgcaggcattctgtatcccgggttctgtagctgacgaccgtaaggttggtatcggtcatggtaacctggctgctatgttgcttcgcgaagaaactaaatgtttcgcattccttgcaggtcacgaatctttcgctgctgctgaaggtgctatcaaaatcgctgcaaaagcagacaaagtacgtaaagagccattgcgttgcatcctgaacggtcttggaaaagacgctgctcagatcatctctcgtatcaatggttttacttatgttcagactcagtttgattatttcactggtgagctgaaagtagttcgcgaaatcgcttactctgacggtcctcgtgcaaaagtaaaatgctacggtgctgacgatgttcgcgaaggtgtagctatcatgtggaaagaaggcgtagacgtatctatcacaggtaactctactaacccgactcgtttccaacacccggttgccggtacttataagaaagaacgtgtattggctggtaagccatacttctcagttgcttccggtggtggtacaggccgtactcttcaccccgataacatggcagctggtccggcttcttatggtatgacagatacgatgggtcgtatgcactctgatgcacagttcgctggttcttcatcagttcctgctcacgtagaaatgatgggattcctaggaattggtaacaatcctatggtaggttgtacagtagcttgtgctgttgacgtagctcaggctttggctaagtaattaaagttacattatataaataaactcctgtagtccatgtgattacaggagttttttatttgtggtaatttgaagtagatggtagttttagataccttatctcacctatcatttagaattgttgaatgatagatttatatacaatgaatagctacatttacataaaatcataatcaaaagaagcagcaggaacgcttgaagcagcaggaacgcttgaaccagcagaaagctatgagagagggcaaatcgaagaattaatatcttttgccaactcaaatcatttatgaataactattatagtattgattaataacagattgctatagtttacaagaagccgaaataataggattcttgggaattggtaacaccccaatggtaagttgcactgtggcttgcgctgtagacgtagctcaggccttagctaagtaataaaagttacttattattatacaggagagaattttttataaggcactctcctatttttataaaaaagatgatgattgttacaaataatctacactatcgttgtttagttctctacaacaaattcttaccatgaaccagcttataacatatctttgcaatgagataataatatccataaattattaaaaagagaagaggatataaagagagaattttagaaaataaagaattacataaaataaactctcgaaaataatccagtatgacacacatcggacaaattattgaaaaagagctccatcgccaagaacgctcggtcacatggttcgcaagacgactctattgcgatcgaactaatgtatataatatatttagaagacagagcttagatacagaactgttgttacgtatatccattatattagaatacaatttcttccaaatatattctgatatatataacaacagaacatagaaatatcttctacaaccttgtatataaaacagcaacaattaaaaggatatttatgtttaaagagcatgtatctttgcaaagttttttaagacaaccaaagtatatgactaaaaagattacacattaaaaacaaaaaagatgaaacaatttagaattttaagtatgttgatgattgtgcttatatcaagcctgtcatttgtatcatgtggagatgatgatgatgaaacgtctggtgatttcagtgccagcatagcaggagtttatacaggtaaactcaaagttggaactaatgttacagctgatgcatatgtagtcactgtcaccaaagtatcttcttctgtagtaaaagttaccgctgacttctacacagataacggtagtgaaaattacaatgttactaaagaaggcaatcaatacattctttcaagcgaaagctcatctggtatcaacataactgttacaggtaaagcaatgactataagtttccttaataatgcaggaagtatgaccacttttaccggaactcgtgattaaagcccaccaatctttacagtaaaagtagaaattcagtaaaggttacaaatatcccaaagccgtaatttcccttttcttgaaaatgagaaattacggcttttataaataaaagctatgaaaattgtatataacactattctctttacattactatttctagccacaagctgtgatcattcggagaaaatcgatgatataaaacttgaaatttcacaaaacatcttccgcaacatcgacaataacggagggaaaataactgttgctatcacatctaattctgaatggatcatcgcaaattcagctgattggtgcataccagacaaatatcaaggagaaggaaacgatatacttactataaaaattctagctaacaccaaacatgcaaacagacaaactaatctaatcatatccgcccaagggataaaccaaacaatcaagatttcacaacaaaaaggagaagttaatccagatttagataaaatacactatcaattacccgttattttccatgttctttatcaaaacgaaaatgacataaatcaatatataaaagaagaccatttaaaagatgtattagtgcgaactaaccatttctatcaatctgaaaaatgtggaattgatataaatctcgaatttgtattagcaaccaaagataagaatggaaccacattaccagaacctggagtagaaagagtgccatttaatgagcttcctattgattgcgaaaagtttatgagagataatacaggaaaatatacatctttactatgggaacccaatgaatacattaacataatggtatatccttttacggattcgcagattttaggcatatctacatttccatatagtttaaaggacttttttttagaagggactcaacaggtatcagcttcgtggatcactttagagaatttgagtttcccatattgtatatcgatcaatagttcatatatttatgagcaaagtacagatgaaagaattaatcaaaacgatgctgcaataacattagcacacgaactcggacactatttaggattacgtcatgtattctcagaaggagggaccacttcaatgtgtaccgatacggattattgcaaagatactcccagttataaccgtagtgagtatgaacaatggcttaacaatttggataaacagaataaatatcaattaaaagatttagctaaacgatatagctgtgaaaaaggagaatatgaagcacacaacattatggactatgcatattgcttttataatgaaataactttagaacaacgaaaaagaatacgccatatcttaaactatagcccactgattccaggtcccaaagaaagcagaatagataccagaggcgtacaaggcagattgaatttgccaatatgtataatgaaataacataatcaggtaaaacggggcagcaagtatttcatcgattgttcctccatagtagtcaaatgtcagaacaagtcttgactattacaactaattatccgttttctacatcacaatacaaaacttttatacaggataacttgttattacaatataaccaaacatcatgaaacgatgctactgacatttttaaacatactggccaccatcattggcgtaatcagcttattgattgtaacctatggagtattcgtaggattcatcgcttttctccgtaacgaattcaaacggatcaacggaacctataccatcaataatgtccggcagctgagagctgatttcggcagttacctcttattgggattagaatttctaattgcatcagacatactaaagaccgtagtagacccgactttagacgaactggctattttaggaggtgtagttatagtaagaactgtattatcagtctttctgaataaagaaataaaagaactagccgaagaagaaaattcaaaaagcacataaatagattggaataaataaaaaatgtattacttttgcatgaattcttaatgacctatggtatggaatatatcaatgaatttcacaatgactgaaattccaaagaatataaaggacacgatatgaaaaagaacttactattattactttgcttgttttgtctggtcaatgtttgccatgcaaaagcgaaagacacttttaccgttttccaattaaacctgtggcatggatgtactaaagtacccaacggagatcaaggcattattgatgtactggatcagatggatgcggatgtcgtttttctgtgcgaaatcagagacggaaaacagtttatccctcatgtgatcgaagagctggagaagagaggaaaacattactatggtgaaacgtttgatcttgcaatcggtgttttgagtaaattcaagccggacagttggaccaaatgctgcatcgtacctggtgacgaaggtcgtgctatggtgaaaatggttgcaacaatcgaaggccaacccgtatctttctattcttgtcatttggactaccggcattatcaatgctatatgccacgtggatataatggtactacctggaagaaaatggataagccgataacggatgaagaagaagtcttgaaagcaaacagacagtctttccgggatgaaaccatccgtgcttttattcaggaagtacaatctgacattcaacaaggccgcccgataatcatgggaggagattttaatgagccctctcatttagactggcaggcagatacaaaggatttgtgggatcataatggggctgtcattcattgggactgctcaatgatgttgagcaaagcaggattcaaagatacatatcgcgaaaaatatcccaatacagttcgatatcccggttttacattcccagccggaaacaaactcgcagaagaggctaaactggaaaagttggcttgggcgcctgaggcagacgaacgtgaccggattgatttcatttattattatccattggagtcgatgctttccatgaagaatagcaagttggtaggtccctccgaaacagttgtccggggaaaaataacagaaaatgattctaaagataagattctgacgccttcttgtatttggcccagcgaccataaaggtaatcttgctacatttaagattcggaagaaacggtaatagtatattgagtagggtgactttcatcgtgcgtcaccctaaaattccaaagcttcaaatcagagaattctcttccttctctatcatcttatcataatacgcaatgcgtgcggcacactcccgaatagtcacctcgcgcaatgcttccgttcgtgccagcatatattcgtattgttcttcactgacagtgaatagtcggttgtaccgagcttcgatatacgcccgacataatttatcaaacgcttctctatcttcgggagtattaactggaaatacattcgcgaaacctcgtgaacggcttttagccatcgggcccaacacttccaatttatgggatttagggcgagtgccactatggacaagcatatacgtcttgtagtaacgttcgcaagcttgatgtaaaaagaatgaacctaatttatattctttttccacttgagccaattttccatgtcttaataatccctctgccatgtcgaaacatcctgcatattcttcctccgcatattgctttatttcccgatacggcaacttctccggtttgccaatctgaaacgtgccgtcatcatataacagaatgccgtctcttaaggcctcataaaagaaataatgtttccttcggatagcccgattaaaagttgtcgtgctttcaacaatgatctgaggtggtgcaggatgtctccttccttccattcgtttatcatacctaggaacaacaaaggcgttcgcatgattctccgctttaatagcatcgcccgtatcacatatcaccagaatatcaaggtcgctttggtagtaagtaagtccacctcgttcgtcgtatgtttcatcccaaatgacatattctccacgtgcataactcccatagaggataatcatacgtacattcacaaggtactgcaatatcagttcttgcagcactgccaactcttcctgtgtgcgtttgggcaaacgctttattgatcttttcataatgacaatcatctattcttaaccgcaaagataacttaaatcagtgtattaatgattgtattgaaacgcttttttcaagactttgatagtgtgttatactaagaaatggcatgtctgctatttttcattccattgattctagtacttactcccatcaactcttgtacttcatcttgcagtttctcgtacttcatacttccaactcaagtacttcaaactctcaactccagtactttacttcttacattcttgtacatcattttccctcttcaagtacttcaatcgttacactcctctgcctcatttcctttcacttttcgttcttttctctttgtatttctgttctttcgcactcacatatgtatactatttgcaccattaaaaagtcctttattccctactgacactgacaactgccactttagcgtttctttaataataacatttctttttccgtttgcatacattactaattatcaacacattataaacatataaaatattaattccatgcacactctgtcagtatggagcatttagtggcagtacttttccattcattcatttgtaaatatatacactacaacaaatatgaataaccggacgaaggtaggaatacaatttcaacagcgttgaataggcttctttcttccagtgatgacaaagttattagtaaactatgattaattcaagtttcgcaagttacttttgcgttatccaaactatcttaattcccctccctcctgggaggagacttaagatactaccgactttttagtcactcccaattgagatactactgtttgtcaataatataaagaatttgcggaacttcagtgattaagagttatttaaaggcattttaatttacatactcatccattcctcttggatgtattctctgtaaagaggccttaaggtgtcagttgtcagtagtgtcagtagatttacttttctgtagggatagcacaacaattaaaatcctgataatcaattaacagatcatcttttttatttttccagtcttctgccgttccaccctgcatttactgacataaaaattgttaatctcccggggaatatcgtaaatatatgatacaaacaagtttttcaccagtctataagaatgaaaacaaataatagaaaaagccagattaaaccacctgttgatttgcaacaaatgagctatcgttcattcccggacaacttatcgattaggacagcatcgatatcttttgccaattcttgataggtcgccaaaggatcatctgtatatacagcacgaataatcccctccttgtctgttatcaatatacggggaatggtatgggaagcaaaaagcgaaaagacagcatcatcattctgagcggaaaaaggcaaggtaaacgaatgtttttcccaataggcttgtacttcagagcccgattccgaacggctgatacaagacaataatacatccggattctctttatatgtatcataaactttctgaataaccggaagttctttctgacaatccggacaatccgtatgaaaaaagacaatcactccaaccttcccgctaaatgactgcgtattcaacattcccccatcactcatctctaccgaaaactgaggaagggcgtcaccggcaacaagagcaaagtctcccctatcatcatcatcgtccgtgatacaggaagaaaaaactgccagaacgatacatagcaatatcaccactttgcttcttatttccactttcatatctttcttcgttagttatgcaactcccaaaagctctacctcaaataccaatgtcgaaaaagccggaatcggaccggatgcacgggttccgtatcccatcgtgtaaggtatatagatgatccatttatctcccgcacgcatccgttggagcgccagttgccaaccatctattacatcgcagaggcggaaagcttccggacaattacgttcataagaattatcgaacacccgaccgttaatcagactccccttataatgaacggtaacaatactccgcacattaggaaaaacagtccccgtaccggtctccaaaaccttataatagatgccgcaaggcaaggcataaacaccttcctgcgatgacaattcttttaagaactccaaattcgtctctttatattcttgctttcttcccataaatacatgatttgaatgtacaaaagtaagcagatttaagagaattcttccataaaaactgtatatttgtttgttgaatcataaaacctcatcgctatgggacaaattaaaaccagatgcagcactgctgccggactattcttgattcttttgacagtaattgcgggattttcgtcctgtaaaagtaatcagaaagacattattccttctgccgaatacgctccatacgtcaatgcttatacgggaggagtgatttcgcaaaactcaacgatacgcatagaactgacacaggaccagccgatggtagacctgaatcaggaactgaaagacaatccgttcagtttctctccttcattgaaaggaaaaacgtattgggtcagcaacaataccattgaatttgtccccgaagaaggggcactgaaaccaggtgccttttacgaaggaaccttccacctgggagatttcgtcgatgtagacaaaaagctggaagaattcaacttctccttccgcgtgcaggaacgaaactttagtattcataccgatccgataaccgtcacagccacccagcccgaccaagtgaccgtaacgggtgaaatacgtttcagcgatgtagtgaaaaaagaggaagtagagaaaatgctcacagccggaagcgaaaagaacaaaagctatccgattgaaatcacccagacagatcacccgacccgatacgcattcagcatcagtcagataacaagggaggcggaagattaccaactggaaattaccgccaaaggcaatccggcaggcatcgaccgtacccaaaacgaaagtattctgatcccggcaaagaacagtttccgcttcctgtccgccgtacgcatcgaccaaccggaaaacggaattgaaatcatattctccgaccctgtatccaacacacaggatttgaaaggactcatcgacgttccggaagtttcttcctctattttccagatcaaagaaaataaagtattcgtttacttcgaaaccggcaaactgaacaaactgacgctgaatatccatgaaggaataagaaacagccaggacaaaccgctgggcacttcccactccatctcattcagcgaactgaacctgaaaccgcaggtagaaatggctacttccgccgctatcctgcccgattcgaaaagtctgatcatccccttccgtgccgtcaatctatatgcggtggatttgagcgtgatccgtattttcgaaaacaacgtattgatgttcatgcagaacaactcgctctcctcagccaatgaattgcgccgttcgggaagactggtttataagaagacattgtggctggcgaaagattcttccaaagatgtgcaccgctgggaagactattcgatagaccttgccggattgattcatcaggagccgggagccatttaccgtgtcatcctctcgttccgccaggaatactccgcttatccttgcgggggaagtgaaaacaaggaaatgcagttcgcggacaacaagtcttccgacaacctgaccaaagtcagcggagagacattgtcgggagacgatgaagcggtatgggacactccggaaacatactattattataacggcagcgtgccgatggactggagccagtaccgatggacagaacgggataatccctgccatccgtcctactatatgaattccgaccggatagctgcctgcaatatctttgcctccaatctgggaatgattgtgaaacgtaattcactgaataagttgtggattgcggtaaataacattctggatacgaagccagtagcgaaagcacaggtaacaatttacaacttccagctccagccgattggaaagggagagacgaacggtgaagggctggtagaaatcactccgaagggagttcctttcatagcggtagccgaagcggacaagcaaaaggcatatgtacgcgtggtcgatggcgaagagcagtcggtcagccggttcgatgtgggaggaaaagacattcagaaaggtctgaaaggatttatctatggcgagagaggcgtatggcgtccgggagatacactgcatatttccttcatgctggaagaccgggagaaacgcattccggacaaacatccggtagcattggagatttacaatccaagaggacagttctataccaaaatgatctctacgcaggggacaaacggattttatacatttgccgtgcccacacaagccgacgatcccaccggattatggaatgcctacgtgaaagtaggaggaactgccttccacaagagtctgcgcatcgaaaccatcaagccgaaccgtctgaagattacactggctttaccaaccatccttcaggcttcgagcaaagacgtatatgccccgcttacttcttcatggctgacgggagccaccgcatcgcggctgaaagcaaaggtcgaaatgtccttatcaaaggtcaatacgcagttcaagaactacgggcaatacctgttcaacaatccggcaacggactttacgaccgtccgggcggatgtgttcaacggggtgctggatgcggaaggaagagcaggcgtcaatatacagcttccggtagcaacgggtgctccgggcatgctgaatgcaacgctcaccacccgtgttttcgaaccgggaggagatgcaagcatttactcgcaaactgttcccttctctccgttcacatcgtatgtgggcatcaatctgaaccagccgaaaggaaagtatatcgaaacagacaaagatcatgtgtttgacatcgtgacggtcaacgatcagggacagccggtgaaccgttccaatctggaatataaaatctaccggatcagctggagctggtggtgggaaaacggtgaagagtctttcggaacttacatcaacaacagttccatcactcccgttgccagtggtaacctgcagaccacaggaggaaaaacctccttcaagttccgcatcaattatccggattggggacgctatctggtgtacgtgaaagaccgtgaaagcggacacgccaccggaggaaccgtctacatcgactggcccgactggcgcggacgttcgaacaagacagacccgagcggcatcaagatgctcgctttctcactggacaaagattcttatgagataggagaaacagccacggcaatcattcccgcagccgccggaggacgtgcactggtatccctcgaaaacggttcgaccgtcttgcagcagcaatggctcgaagtgtccgatcagggagatacgaaactcaccttcaagattacaccggaaatggctccgaatgtttatctgcatatcagcctgttgcagcctcatgcgcagacagtcaatgatctgccgatccgtatgtacggcattgctccggtatttgtgaccaaccgtcagacgattctgcaaccgcagatcaagatgccggaagtgctgcgtccggaaactgactttaacgtgactgtcagcgagaaaagcggaaaaccgatgacttatacactggcgattgtggatgacggtctgctcgatctgactaacttcaagacgcccgacccgtggaacgagttttatgcacgcgaggctctcggcatccgtacatgggatatgtacgacgatgtgctgggtgcttccagcggacgttacagttcattgttcagcacgggtggagatgcctcgctgaaaccggcagatgccaaagccaaccgtttcaaaccggtggtcaaatttatcggtcctttctatcttgcgaaaggcaagcaacagacacatacgttgaagcttccgatgtatgtgggttctgtacgtgcgatggtagttgccggacaggacggcgcttacggaaatgcggaaaagactgcatttgtgcggacaccgctcatgctgttgtctactctgccccgtgtattgagtacgcaggaagaaattaccgttccggtaaatgtattcgctatggagaaccaagtgaagaacgtgaccgtatcgctggaagcatccggcgcaggcgtacagatcacgggcaatcgccagcagtcactcacttttgaccagccgggtgaccaactggcatacttcactctgaaaacaggcagcaaaaccggaaaggcaactatccacctgacggcaagcggcaacggacagcaaacgaaagaaacgatcgaaatagaagtccggaatccaaatccggtggttaccttacgcaacagccaatggatagaagccggtcaggaggccgaactgtcatacacactggcaggttcttcttcggctaacaatcaggtgcaactggaagtctcccgcattccgtcggtagacatcagccgtagattcgacttcttatacaactatcagcatcattgcacagagcaactgacttccaaagcattacctctcttattcgtctctcagttcaaggcggtggacgaacaggaagccgagaaaataaaggcgaatgtacaggaagctatccggcagatatatgcccgccagcttcccaacggcggatttgtatactggccgggcaacgccgtcgccgatgaatggatcacttcttacacgggtatgttcctgacactggcacaagaaaaagggtatgccgttcatccgaacgtactgaacaaatggaaacgcttccagcgtgccgccgcccaaaactggcgtatgccgcaggaagcaagtaactggcagatatggcaatcggaattgcagcaggccttccgcctctatacccttgcactggccggtgcaccggaatacggagccatgaaccgcatgaaggaacagccgggactctccatccaagccaaatggagactggcagccgcctacgcgctgaccggtaagatgaaacctgccggagaattagtatacaacgcagaaacgaccgtcattccttattcttccatgaacctgatttacggttcgtccgaccgggatgaagcaatgattctggaaacgctcattctgatgaagcgggatcgggatgcgttgcaacaggctaagaaggtatcacagaatctggcacaagaaaactggttcagcacgcagtctaccgcctttgccctgatggcaatgggacgccttgcggagcaattatccggtacactggatttcacatggaactggaacggcaagcaacagcccgccgtgaaatctgctaaagccgtatttgaaaaggagatagctacttctccgaaatcgggaacagtctctgtgaagaatcaaggcaaaggagcattgagcgtagacctgattacacgtacccaattgctgaatgatacgctgccagctattgccgataatatccggctggatgtaaaatacacagatatggcaggttcaccgatttccgtggaagacatcagacagggaacggactttatgtctgcagtcaccctatccaatatcagcggtacttccgattacagcaatctggcactgacccatattataccgtccggatgggaaatatataatgaacggatgattgttccggaagcgtcctcttccaattctaatgaagcgaatactccggaaagttcagccggtaagtacacctataaagatattcgtgacgaccgggtattgacttatttcgatctgcgacggggtgaatcgaaaacatttaccgtaaggttgcaggcaacttatgcaggtaacttcattcttccggccattcagtgcgaagctatgtatgatgcagcggtacaggctcgcaccaaagcgggaagaacgactgtcagccgatgacaagactctgaacaataagacagcattgacagatagcataagtgcatgggaagcaaaatcttgaatttcttcaaacgattgtccgtcacccaaaaagtaatactttgtattcttgcttttttggtgacaggatatatcttttgtcttccccgccacctgtttcatgtcccctactccacagtagtgacggaccggaacgaggaactgctgggtgcacgcatcgcctccgacggccaatggagatttcctccccgaaacacgactccggaaaagatcaaggaatgcctcattactttcgaagacaaacatttctatcaccattggggagtcaatccgttcgctatcggaagagctttctatcagaatgtgaagaataaacgcatcgtaagcggaggcagtacgctgaccatgcagaccatccgcctggcacggaacgaatcgcgcaccttccgtgagaaactgattgaaatgatctgggccacccgcctggaatttcgcgcttccaaagaagaaattctttccatgtatatctcccatgcccctttcggaggaaatgtagtgggactggatgccgccgcatggcgctacttcggacattctgccgatgacctatcgtgggcggagtctgccatgcttgccgttcttcccaacgcgcccgccatgattcatctgtccaaaggacgaaaaacgctgcttgacaagcgaaaccgcctgctgaaacagcttctcgaaaagaaaaccatcgattcgtctacctacgaactggctatcagcgagccacttcccgatgagcctcatccgctcccacagatcgcaccgtatctggtcagccggttctatcaggaacgaaacggcgaatactcccgttcgaccatcaacaagggcattcagactcagatagaagacctggcggaacgatggagcaacgaattcaggcgaagtgatattcgtaatctggccattctggtgattgacattccgagcaatcaagtggtggcatactgcggcaacgtccatttcgaccaaaagcagggaggaaatcaagtggacgtcattcaggctccgagaagtacgggcagtattctcaaacctttcttatattacgcgatgttacaggaaggaagtttactgccggatatgttgctgccggacgtacctgtcaatatcaacggatttacgccacagaatttcagtatgcagttcgaaggggctgttcccgcttcggaagctctcgcgcgttcattaaatattcccgcggtcacgatgctgcaaagatacggagtcccgaagtttcatagtttcctgcaacagatcggactaaagacgattaaccgttcttcttcccactatggtttatcacttattctgggaggagcggaagccactttatgggatgtaacaaacgcatacgcaatgatgggacgcagtttgttgcaactgccgcaaaggtcttgcagcctgttgctcccgacaagccgaatcacagaatcaaccgatccttttcagcccggcgccgtatggcagacattcgatgccttgaaagaagtcaaccgtcccgaagagatcgactggaaatccattccttccatgcagaccattgcatggaaaaccggaacaagctacggattccgggatgcttgggcggtgggtgttacgccccgctatgcagtcggcgtatgggtaggaaatgccaccggagaaggaaaacccgggctggtaggtgcacagacagccggccccgtactattcgatatttttaatctgctcccctcctcttcgtggtttacacgtcctgcgggcatctttgtcgaagcagaggtctgccggaaatcgggacatctgaaaggacggttctgtgatgaaacggacacacttcttgttttaccggcaggactgcggacagaagcatgcccctatcaccatctcgtcactttatcagccaatgaaagccagcgtatttatgaaaattgcgccaacacggagcctacgcttcgaaaaagctggttcacactgccacccgtatgggaatggtattacaagcaacatcatccggagtataaaccgctgcctccttttaaagccggatgcggagaagatactttccagccgatgcaatttatatatcctccgatgaacgcacgcatcaaactgcccaagcaactggatggcagcaaaggtttcctgactgtagaactggcgcacaacaatcctaacgctaccgttttctggcatcttgacgagacctaccaagcacagacacaggactttcacaaaatctccctgcaacccgccgccggcaaacattcgctgacggcagtagacggtgaaggaaataccatctccaccactttctttgttgagtgatattcattatctttgcggcatgaaacagtcattaaaagaaaacggaggtctgccggcatccatcctgtggacgctcgccattgtggcaggagtctcggtagccaacatctattatatccaaccgctgctaaatatgatacgccatgaacttggcatatcagaattccgtaccaacctgattgccatggtcacacagataggctatgcagcgggactcttgtttatcactcccttaggtgatttgtatcagcggaaaaagattatccttgtcaatttctttgtcctgatattctccctgctgacgattgctttggcagataatatccatctgatactccttgcttcgttcttcaccggagcctgctccatgattccgcagatattcattcccatagccgcccagttctcccgtccggaaaacaaaggcaggaatgtcgggatcgtcctatcgggcttgctgaccggaatccttgcttcacgggtggtcagcggattcgtcggcgaactgttcggatggcgcgaaatgtattacatcgccgcagccatgatgttcgtctgcgcgattgtcgtgctcaaagtccttcccgatattcagaccaacttccggggaaagtacggcgacctgatgaaatccctcctggctttggtgaaagagtttccgcagctacgcatttattccattcgtgcggcgttaaacttcggttcccttcttgccatgtggtcctgccttgccttcaagatggggcaagccccctttcatgccaacagcgacatcatcggtttgctgggattatgcggtgtggcgggagcattaaccgcctcctttgtggggaaatacgtaaagagagtgggtgtccgccgcttcaacttcatcggttgcggactgatcctcttttcatggctactcttcttcgtcggagaaaacacctaccttggtatcattctgggaattatcatcatcgacataggtatgcagtgcatccagctcagtaatcagaccagtatcttcgaactgtcaccccgagcctccaaccgcatcaatacaattttcatgacgacctacttcgtcggcggttccctgggaaccttccttgcaggtacattctggcaattgtacggatggcatggtgttattggaattggagctacactgacctgcatttctttactaattacaactttgtcgaagaagtgagtcaacaaaacggagcagtaaaccgtttaatacaaaaaaagggaaacatgaaatacggagttaacaaagaaatcttacttatcacagcaggcaccgtctggattatcgccggtgccaatatcttgcgaataggcatcgttacatggcttaataactccgaaggctggatgttcaagataggagaagcaaccatcgtctttctgctgttcttcgtattaatcttcaaaagactctattacaagcatactcaaaggatcgaacggaaaaaggaacagaagaactgccctttctccttcttcgatgtcaaaagctggatcgtcatgatctttatgatctgtatgggcatcaccatccgcagcttccacctgttgcccgaaagttttatatctgtcttctacacaggactgtccatcgcactgatcctgaccggcgtactcttcatccgttactggtggctgaggcgcaagacgaatccggtgtaacaggaaagcatctatattccaataaaatataaacttataataaattttattgtgctgtccggcaaggcaaaaagaattctgtctttttattgtatctttgcgcgaccaaaaaaataaagaaatgattccaacccaacaggatattgccgaattcacccgctttcaacgaaacgagataacagaaagcatcttatatgaacggctcgcatctatcgaaaaagacgagaataaccgcaaaacgctccgactgatagcagcagaagaaaagtcgcattacgctatcctcaagaaatatacaggaaaagaaatcggtccggactataagcgtatcgcccgtttctactttctggcacgcatactaggtatcacattcgccatcaaattaatggagtccagtgaggaaaatgcccataataattatgataaatatgcccatataccggacctacaacggctggcacatgaagaagaagtgcacgagcaaaagttgatttcacttatcaatgaagaacggctggaatatatgggatcggtcgtactgggacttaatgatgcgctggttgagtttacaggtgcactggcaggtttcacccttgccttgagtgacagtaaactgatagcactgaccggcagtatcacagggatagccgctgcactgtcaatggcatcttccgaatatctttctaccaaatcggaaggggatgataagaaacatccggtaaaagcagctgtatatacaggaatcgcctatctgatcacggtagtgtcactggtaactccgtttatactgatcagcaatgtaatcgtagctttgggggtgatgctgaccatggcacttatcatcattgcccttttcaactactattattccgtagcccgtggagaaagcttccgaaagcggtttacggaaatggctgtactcagtttcagtgtggcaggtatcagtttcctgataggatacgctctaaagacatttaccggaatcgatgcctgaaatcaataaagcatccgacatcattgaaggtccggcagttacataataaagaaacctaaaccaccagattaaataataaagcgttatatttagaatgaagaaagctccatctcccctcgtatcactattgcccattgtcgtattagtgatattactattcgccaccattcgtgtatttggcagtgatgccctcaatggcggaagtcaggtatcgctgcttactaccaccgccatttgtatccttatcggcatggctttctacaaaatcccttggaaagactacgaactggcaatcacgaacaacgtggcaggagtgacaacagccatcatcatcttactgattatcggcgcattaagcggtatctggatgattagcggagtagtgcccactttgatttattacgggatgcagattatccatcccagtttcttcctgacatccacctgtattatttgcgtattgatctccgttatgaccggaagttcgtggacaacgatcgccaccatcggtattgctctcatgggcatcggaaaggcacagggatttgaagaaggctggattgcgggagctatcatctccggtgcctatttcggcgataaggtttctcccttgtccgaaacgaccatattggcggcatccgtcacggacacgcccctcttccgtcatatccgctacatgatgattactacggtgccctcactgatcatcacactgattatatttacggtagcaggtctgtctcatgacgccagcaatacccagcacatcgcggaagtggcagctgccctgaacgaaaagttccatatcaccccgtggctgctgattataccgatagcaacaggcatattgattgcacggaaagtgccttccatcattaccctgtttctgtccactctattggcgggcattttcgctctgatcttccaaccggatttgttgcgggaaatttcgggggctgccgtttccaacttcgactccctgtttaaaggactaatgatgaccatctacggcaagacaagcctgcagaccgacaatgctgttttgacagatttaattgccacccgtggtatgtcgggaatgatgaataccatctggctgatattatgtgccatgtgtttcggcggagcaatgacagccagcggtatgctgggaagcatcacatcgctcttcgtacgcttcatgaagaaaacggtcagcgtcgtatcggctactgtctgttcggggcttttcctcaatctggcaactgccgaccagtacatcagcatcatcctgaccgggaatatgtttcgcgacatttatgctaaaaaaggttacgaaagctgcctgctcagccggaccaccgaggattcagtaaccgttacatccgtactgatcccatggaatacctgtggaatgactcaggctaccatcctgagtgtgcctacgctggtgtacctcccctattgctttttcaacattatcagtcctttaatgagtatcgctgtcgcagctatcggatataaaattgtaaaacgcccgtgaacaatctggcatacactttgtttttgcaataaacgaacaacgtattaaacctaaacaaaaaaaagttatgaaaaagtttattgcattattagcattagttttagtaagtgcgagcacaatgatgtatgcacaggaaagtaacgcagccatccgccgcgcagacagaaaagcagaaagagacgcagaaagagcaaaacttcgcgcagaagaacaggtacaggacatggcagcctaccagcaggctgtacaggctttgaagaacaaacagtttgttctggaagccaatcaggtgatcttccgtaacggtatgagttccttcgtgacttccaacactaacttcgtcctgatgaacggaaacagagccactgtacagacagctttcaacactccttatcccggccctaacggtatcggtggtgtgactgtagacggtaactcttcggacatgaagatgaatatcgataagaaaggaaatgtaaactgttcattcagtgtacagggcatcggtatctcagctcaggtatttattaatatgagcagcggtaacaacaatgcttcggtatctatcagcccgaacttcaataacaacaacctgacattgaacggtaacatcgtcccactggatcagtcaaacatcttcaaaggacgtgcctggtaatccgaacagaagaatataagaataactccgctacaaatcgcgcaaaatgcgtacatttgtagcggagtttttttaattgatcattatgagggaatatatcatcgcagataatcaggatatcagcaaggcaggaatgatgtttctgctaagccggcaaaaggatgtatccgttcttttagaagctgacaacaaggccgaactgattcagcagctgcgcctgtatccgcaagcggtggttattctggattataccttattcgattttgccggagcggacgaactgatcgtcctgcaggagcggtttaaagaggccgactggattctgttctccgatgagttaagtatcaattttctccggcaggtattattcagcagtatggctttcggagtagtgatgaaagataactcaaaagaggaaatcatgtccgccctgcaatgcgcttcacgcaaacaacgatatatctgcaatcatgtcagcaatctgctgctttcggaaacggcttcttccgccgcatcccctgcaacggtggatgatcatctgctgacgcagacagaaaagaatatcctcaaagaaattgcactagggaagacgacaaaagaaatagcggcagaaaagaacctcagctttcatacaatcaacagccaccgaaagaatatcttccggaagctgggagtcaacaatgtgcacgaagctaccaagtacgcgatgcgtgcagggattgtggatttagcggaatactatatttgacagccggttcagttctgaaagggaacagcctatcgggttatctcaccacttcctacacatatccccgcttcttcatcataaatcaccccgaactgaccgggagcaatgccctgcaacttctcagaagataagatacggaactgaccgccctcttcctgtaccagctttcccttcgtaaattcaggagtgtgacgaatcttgaaggtaatatctatctcctttccggcatctttccacggattctccgtaataaagtggaaatcattgatacggaactcactgccaaactgcgtttcgactccatatccatgagagacatagatgatattttcctcaacatccttcttgatcacaaaccagggaccgccactcaatccaagtcctttccgctgtccgatcgtatggaaccagtagccgcgatgcgtgcccactttctttccggtttccagttctataatcgccccttcccgctctcccaggaaacgacgaacgaaatcattatagttaatctttcccaaaaagcaaattccctgactgtcctttcttcgggcactgggcaatcctgccctgcttgcgatttcgcgtacttcctgcttcatcagtccgccgataggaaacatcagtttggaaacttgcaggtagtctatctgggccaggaaatccgtctggtctttaacagggtctttggctgttccaagccacgtcttgccgtcctgccggatggtggtggcgtaatgccctgtcgccgtaaaatcgaaattctttccgacctgctgttcgaaacagccaaacttgatgagtttgttacacatcacatccggattcggtgtcagtcctttctttattttatcaatcgcgtaggcggccacattctcccaatactccttatgcaaatccacgacttccaaggacaaaccatacttacgggcaatggcagtggatatttcaatatcttcttcggccgaacaatccatatactccgccccatccatacctattttgatatagaaaagagtcggtttgtatccttgctcacaaagaaggtgaacgacaacagagctatcgacacctccggacaataatgcagctatattcatcatcataattattcgttaaacaacaaaagttgtgctaagatgccaatgtattaatcaccgacaaattagcacatcagcaaatctgtttcattaaatctttgtcaaagtcaggttacggtccatccaaaaatcatttactctatatcactctctttggattctaattattctctctctatttatatgaatacctattgatcattttcgatgttgcaaagataaggcgggatttgctaacagcctatcacatattgaaggcatttttataccataaatgtggtagataagcaaagtatttcctacatttgcacactgaaaagctttttaagatgacgaatttacgtaaaatactacttatacctgccctgatcgtcgtatctgtcagcagcttcttttcgtgcggtgtggaccgctggccggaatatgcccacctgactgaactggatacatggatgtatgatatcatgcaacagaattatctgtggtatcaatatatgcctggctacgatgaagtaaacctgtttcaggaccctgccaccttcttatccaaagcaaaatgggacaaagacagctactcttttgtagattctgttctggaagctccgttgccaacctatggattcgactactcgctcgtcaagagtcaggataacgatacggcatacaatgccttgattacttatgttatccccgaatcacccgccgaaaaagccggactccaacgcggtgactggattatgaaagtagacacttcctatatcagcaagaagtatgaaacgcaattgctgcaaggtacaatagccagagaactttcgatgggggtatggaaagaagtcgaggaagaacccgaagaaggggaagaagttccggaagaaccggttatggtgtataaagtagtaccgaacggtgtcacgctggatttgggagccgcccagtctatagaagaccaaccggtacataaatacgaaattctgactttagacaatggtgctaaagtcggctatctgatgtacaacagcttcactgccggaaccaataacgatccggagaagtataataatgaattacgtaaagtctcaacgatattccaggaagccaacgtacaagccactatccttgaccttcgctataacgaaggaggatcgctggactgcgttcagttacttgccaccatccttgtaccaaatgcaagaatgggcactccgatggcttatctggaatataacgacaagaacttggacaaagacgcgaccatcaatttcgatcaggaggtgctgaagaccggtgtcaatctgaatcagaacactttggtagcaatcaccagcggaacaacagccggagcagcagaaatgctactgaccagcctatacaaagaggatcaggctcctaacattattgttatgggtagcgcaagcaagggacaaacagtggctacagagcaattcatcaatgaaacctaccgctggtctgtcaatccggtggtatgcaccgtttacaactccgaccatgatgcaggcgaagacgcatttgtgcttgttcccagcgataaattcaaaataagcgaaacgtctattaacgggactactgattacagccagttcctccctttcggcaatcctaaagaaagaatgctaagcatagccatccagacattggagggaacctatccgccgaaagacgaagacaaagaagaagaaactcgaagtaccaagagtattaagatagaaaaaagtgtcagcagtcctgccagcagaagatttgccggagggttacggattaaataaacaagtatgaaaaagatagcacttctgttgtgtgcgatagtaatgttcggttgttcggatgatgaagaaaaagcaggcacagaagttcctgacccggaaataagcaagatgctgttctccgaattttgcaagtccgatggagccggggtatctgatgttagtaaaaaggaagagtttcactacgaagatacctggctgaccggttatacctacacgcaagaagtttcgatagcggacttgacagagatcatcagccatccgcttaccatccaatacggaaacaacagaagcagtgttactttcacagacgaaatagggactgagcgtaaatacaccctaaacgaagaaggatacgccacgcaatgcgaatatgcttctctcgaccagaagagacaatataccttttcatatacggacggctatctgacacaagtgaatgaaaagattatgccccaggaaggaagcagcgatgcagttgtcgcgcacactctttctctacagtatgacaagggcgatttaatttccaccatctctccttcactgccctatgaatcatccaccggttacggaaagcttcagactaattatgaagcgggagaagatatcaattattatcgtcttccctgtatgctggtggcggatacttatcccctttccttccatcgtgaagccttgtttgccggcatgcttggcaaaccgacacaacaccttactatcgcctcttatccggagaaaaccagtgacacatacaccgaaagaaccgaatatacttatagctttgataaaaacaagaaacctgtcagtctaaaggtcagcactaaatatggtaatggcaaaagtatatcttatctgaatcgcacgatctcaattacgattgaataacccgattcttgtcaagagcagaattatagattcttaactccgactggccttttccgctacataaaagtctgtttatcgaaacaaagcctccgttttcacctaacaaagcatctgattacacttaacatagtatgtaatttgccttaacataccttctaattcttcccgacatcccttctaaatttcaataagcaccaagctgaaccactcccagcaccgatctgaacagttcctcaccaagtagtacacaaaaaaaggagaaagttttcacttcctccttctatcgtagtttaatttcaatctactatatgattatgtctccaaagatacgacatccggatgcaaaagtcaagcttttccggttttatttcttgaagaatttatcaaagaacaaaatctggtaatcgatagcgttattccagtattctccggtatgtcctccgggacgggtgataaaatcatgatcgatcttcttttccaataagcggttgtgcaaatccttattcacctgaatgaagaagtcagcctcgccacaatcaaagataattgccaaatccccgttctgaatcttatcaatctgattgattacagtatgcgtgtcccatatttccttgttagattcataatcccccaggcgttttgccatgtcccaattcttcgggaacggacgaatgtctacgcctccacttgtacttccacaagcgccaaaggtatctttatgacggatagcagtccacagaccaccatgtccgcccatactcagaccggtaatggcacgccccttgcggtcggtgattgtcttgtaatgtccgtcgatatacttcaccagttccgatgagacaaaagtttcatatcggaaagacgggtctttcggactgtcccaataccagctggtacttccgtccgggcaaacaaaaatgattcctttctcatccgcaatctgaggcagattgggtttaatctcaatccacgtcttggcatgtccgccaaaaccatgcaagagataaacagtaggacacgccgtagctttctttcccaatgccgcatccggagtgactactactaccttgatgtccttgttcatggaaggacttttcactaataacgtatctactttggcagcaaaagaagacgctgccccaactaacaaaagagcgattaatagaagttttttctttttcattgtgtttataatatgtttagatccaatcattcttcgtcttctcccgaaggttgaaattcggcaacaggtgtctcaaaagtctgatgacactgctggcaagtatattcccaatgattgtcccccggaggcgccgctgccagcatggaaagtacagccgcaccaacggcacgcagtttgtgtccttttctcaatacgaatttaatatcggacgaaccgcaataaggacagagcgtcagttcttcgggccagctttggttctgcctcagcacctgaacggctttctcataatcttcatccgctaccaggatatccactcccgcaatactgctcacgcaacttttatacaaagtagaaaagttctcattatgcagaatagattcaatgccctcattctccagcgccccttgaaggatatgcgccttcatcgcgtcattacaggtaatcaattttacggttttcatacttaaccagattttattattcccacaaaaatagaacataaaattgaaatgtgaaactattttccattaactttgcagtcgctaaactacaaataacatgaaaagactactgtcgcttctgctgttttgcaacataaccatatccttccttctggcacagcctgtccaccaagtgaagggaacagtcattgataaatccagccgtcagccgttggaatttatcaatgtaatgattgtcggactcaataaaggcggagtgacgaatgccgaaggtaagttctcgatcgggcaagtaccgcccggcatctatcgcctgcaagcgtccgctatcggatacaaaactgtcactacccccgaatacatactttcgaccagagacctacatatacaaatagagatggaagagaatcagacggaactggaaggagtgaccgtcaccgcctcccctttccgtcgggacattgaaagtccggtcagcctgcgcatcatcggattgcaggaaatagaaaagagtccgggagccaaccgggacatctcacgcatcgtacagtcttatccgggagttgccttctcaccgataggataccgtaacgacctgatcgtacgcggtggatcgccttccgaaaaccgcttttacctggacggagtagagatccctaatatcaaccatttcagcacacagggagcatcgggcggtccggtaggtatccttaatgccgacctgatacgggaagtgaacttctataccggagccttcccgacagacaaaggaaatgcgctcagttccgtgctcgacttcaaattgcgcgacggggacatggaacgcaattccctgaaagctactctcggagcttccgaagtctcccttgcctccaacggacatttgggcaaaaagacttcctatctggtttccgtccgtcagtcctacctgcaattcttgtttgatatgctcgggctgccctttctgccgacttttacggatgcgcagttcaagctgaaaacaaggtttgacgcccggaatgaattgactgtactagggctgggcggcattgataagatgaagctaaacaccaaagccgacgatgaagacaacgaatacatcctcagttacctgcctaagattcagcaggagacgttcactctcggagccgtataccggcactatgcgggggcacacgtgcagtcagtcgttgccagtcacagttatctgaacaaccggaacaccaaatatcagcagaacgacgaaagcgatccggatcgtctgatgctccgcctccgctctacggaacaaaatactcagctccgtcttgagaacagttcgtctttccgcaactggaaagtcaccgtcggaacctgtctggactatagccagtatagcaacaccacctttcagaaggtatacaccgaccgtgcgcagacgttcgactaccatacctatctgggcatcatgcgttggggacttttcggaacagtcaattacacctccatagacgagcgttttacggcttctctgggactgcgtgccgatgccaacaactactcggcagccatgaaagacctgtccgaccagctttctccccgcctgtcgctctcctatcaactgacggagcactggtcgctgagcggaaacgcaggactctattatcaactgcctccctacaccgctctcggctttaaaaacaataacggactctatgccaacaagtatgcgctccgctatatgcaagtcagccagggtagcgtaggactgaactggagaaagggcgataccttcgaagtatccgtcgaaggattctataaagattatgacaaaattcctctttccgtagccgacggcattccgttgacctgcaaaggaaacgattacggagtgattggcaatgagctgcttacttccaccgcacagggacggtcttacggagcagagcttctccttaaatggctggtcgccaagaaactgaatctcgcctcatctttcacgctctttaaaagcgaatatcgtactgataaggaaagcgaatacatcgcttccgcatgggacaaccgctttattttcaacttgcggggaacttacaatctcccccggcactggagcgtcggaatgaaagtcagctgtataggcggtgccccctatactccttatgatgccgacaagtcatctctggtaacagcctggaatgcacagggaaaaccgtattacgactatacccgatacaatgaagaacggctctcggccttcactcaggtagatatccgcatagacaaaacattctatctgaagcgctgtatgctgggtttctacatcgatctgcagaatatcgcgggcagcaagctgaaacaggcagatgtattaatgagcaccggagtaatcaaaaatccggacgcaccgatagccgaacaacggtatgtcatgaagtcgctcaagcaagaaagcggtacactgctgccgactttgggaatcacgtttgaatactaacactatattatataataacaaactaaaaattcactatgatgaaaaaacaaattgcattagtagccctgttatttttgggcatgagttgttttaacgcttcagcacaattcaagaaattcaatttaggcaaagctattcaagcaggaaaagatgccgcacaagcaatctctctatctgacgccgacattgctgctatgagcaaggagtatatggaatggatggacaagcataacccactgaccaaaccggacagcgaatacggaaaacgcctggaaagactgaccggaaacatcaaagaagtagatggtatgaaagttaactttggcgtatatgaagtagtggacgttaacgctttcgcctgtggtgacggcagcgtgcgtatctgtgccggactgatggacgtcatgactgacgaagaagtaatggcagtaatcggtcatgagatcggtcatgtcatccataccgactctaaagacgcaatgaagaatgcatatttccgttcggctgtaaagaatgcggcaggagcagccagcagccaggtcgccaaactgactgactctgaactgggagcaatggcagaagcacttgccggcgcacaatactcacagaaacaagagtacgaagcagatgcctacggcgtagagttctgcgtaaaaaacaacatcgacccttatggtatgtacaaatcactgaataagcttctcgaattgtccaatggggctcccgcatcttcctacatgcagagaatgttttcttcacaccccgacactgccaaacgtgtagcccgtgctaaagaactggctgataaatacaaacaataaaaaagactcaagatcagaaattacaaaagaacatattccgagagcatttactttgcaacctcggaatatgttcttttgttcttaagccccctcatttcaaagaatacatcaccattccgcaccaattgtttattaaaaaatcattaatatacagcacatatttgcatgatgtcgtgatttcatgtaatttcacggcaataatcatttaaatccatttatggaatttcttatcatacttctcttacttgtactgaatggcatctttgccatgtacgaaattgcgctggtatcatccagcaaagcacgtctcgaaactctcgccggaaaaggcaacaaatctgcacgtggagtactgaaacaactggaagaacccgaaaagttcttgtccaccattcaaatcggtattaccctgatcggtatcgtatccggtgcctatggtggtgtcgctatcgcagacgaccttgttccactcttctccctcataccgggagcggaagcctatgcacgtaatctggccatgatcaccactgtggtaatcatcacctatctctctcttatcatcggagagctggttcccaaatccattgccctcagtaatccggaacgatacgcaaccttgttcagtccgattatgattttattgacgaaagtatcctatccgttcgtctggctgctcagtatctccacccgcctgctgaacagaatcatcggcgtaaaaaacgaagaacgcccgatgacacaggaagagatcaaaatgattctcctccaaagctccgaacagggagtgatcgacaaggaagagacggaaatgctgcgtgatgtgttccgtttctcggacaaacgtgccaatgaactgatgacgcaccgcagagaccttgtcatcttccatcccgacgatacaaaagacaaggtgatgaagacaatcgaagaagaacactacagcaaatatctgttggtggacgagcggaaagacgagattatcggtgtggtatccgtcaaagatattattctgatggtaggcaataaaaaggagttcaatctgcgcgaaatagcccgcccggctctgtttatccccgaaagtttatatgcaaataaaattttagagctgttcaagaagaacaaaaacaagttcggagttgttgttaacgagtatggtagtacagaaggtatcattaccctgcacgaccttaccgaaagcatcttcggagatatccttgaagaagacgatacggaagaggaagatatcgtcagaagacaggatggttcgatgttggtggaagcctcgatgaacatcaaggactttatggaagagatgggaatcttatcttatgaagacctggaggacgaagacttcacaaccctcggaggattggcaatgttcctgttgggcggtatcccgaaagccggagatatcttcacctacaagaatctgcaattcgaagtagtggatatggaccgtggacgggtagacaaactgctggtcatcaaacgggacgaagaataaagaaaaaataacccgagcagtaagctcactatatttatattaacttaaagcacttaacgatgaaaaaagtaattatgttagcagcagtcgtagctgctttggcatcttgccagtcaaaagccaacaaagccgcagaggcagaagcagacagtctttctatagaaatggctccgatcacagaagtgaccgaagtttatgaaggtacactccctgctgccgacggtccgggtatcgactacgtattgactctgaacgctgcaactgacggtgtagataccacgtatacactggatatgacttacctcgatgcagaaggtcagggtaagaataaaaccttctcttctaaaggaaaacaacagactatccaaaaagtagtgaacaaaaaacctaccaaagctgttaagttaactccgaatgatggtgaggctccaatgtattttgtgattgtaaatgacactaccctgcgtttggtaaacgatagcctgcaggaagctgtcagcgatctaaattatgacatcatcaaggtaaagaaataacaacctaaaccctaaccagtaaaatcatcctcgctacagctatctgtggcgaggatgatttcgttaaaagggaagtctgacacatccccctttttatttctatcccaatactccttctccctcctgcaggcgtttcagacgaagcaatgcctctatataataatagtctgcatagataatagaagcgtctatctccgaatgagccggccaatggcctgtgctatgaagcaggaaagccggattacttttaccgctctgataattgtcggaactcaggcttgtcagcatttcgatagcggcatccttgtagtgtttgcccttcccattggggagataggcagacagttcgagcagtgcggaagcaactacggcagccgccgaagcatcacgcggaacatcgggtatgcctggagcactgaaatcccaataaggtactttgtcttcgggcaagcgttccagatagacatcggctactttctgcacaaagtcaaggtatttgggatctttcgtttcacgatagactacggtatagccataaatagcccatgcttgtccacgtgcccacattgtgctgtccgcatatccttgatgagtcactcctttaatcaggttacctgtaatagtatcatatactgctacatgatatgaggtatagtctggacgaaactgacacttcatagtcttgtcggcatgagatacagcgatgtcgtataagtaaggattccccccgttctttgctgcccagaaaagcatctcaagattgatcatattgtccatgatggtattgtggggccagttgcggggttctacttcccgcggccaggacagcatcgtgccgactaccggattaaacaaagtagccaatgaatcggctgtgtccagaatcacttgtttgtaagcgggattcttggtcaggcgatatccgttgccgtagctgcaaaaaaccagaaagcccagatcatgatcataagccggaatgcgggaaaggaactctaaggatgccgtaaacttttcggcttcttccagtatattcttgtcttgtgtatactcataatcataccacaacactcccggccagaaaccggcacaccattcttccttcgttgctttccgacaattccaatgatgttcgtctgccatgacattacgtggcatcattgtatagtctatacccgagtctcctttcagttctaccagtgaacgttgggtctgttccgcgcaataatccagagctttattcacatccaacgtaccggaagtccgatgggcacatgcacaaaaccctagtactacaaccaaccctgctacaatcttcttcattttttcgttctatatcttcgtgttagtttcttattttttattctcacttattctttcttatcatttagttacccggaaccagtctacatccgcccatccgcgatttccgtcattaggagtgacgcagaataaaccgactttcgctcctatccactttccctgccgggcagtaaaaggttctcccgctgctgtatacttctttccatcgagactataggcaaaggtgcaaacggctcccttggcaacctttacccgtaagtaaacggtcttccactcattatcagccactcccggcattttcagatattccaccggaaaactcgccagttccttcacttgttcggggtgctgttgttccgcatctttgcatacgacttgttgcaggataaacttgtcgccggctttacggacagacaaataactataatcccatcccattactatcattccggcttgctctccatcctgcttggcggtaaacgtcagcttggtagtagccgtaaactcttcagcgggaaacttttgcagcaacagattaggcacttcccaaaagttcacgaactctttggaaaggctgcctgcatagagtcggatatatcccagatcggtcgtaaatccgtaggtatcttgtttgttggcatgccactgccactgtaatcccaagtgccgtgtatcgaactcgtcactttccggaggagtagttaccggatacatctttccgacattcggctttttataggtggtgacaggttctccgcaaccgtctttgtctttatctactccgatcacaggccattcattcacccatttcatcggattgagatgaataacacgtccgtaagccccttgatcctgaaagtggacgaaccacgattctcctgtatttgtatctacccagcctccctgatgcggaccgttgatggtggtcttcccctgcgccatcacgatctttgattcatagggtccataaatattccttgaacgaagcaccagctgccaaccggtagctactccgcctgccggagcaaaaatataatagtaaccatttcgtttatagagcttcggtccttctaccgtatggttcttcccgtcatttccatcgaacaccattaccggatcggagatcacttccgttccttccgcattcagttcgcaaataaccagaatgctgttcactccgctgcgactgccggcataagcatgtatcagatatactttcccgtcctcgtcccaaagtggcgtcgggtcgatcattccttttccggctttcaccaatacgggtttgctccatgatcctttcggatctctggtctttatcatgtagattccataatccggatcgccccaataaatataaaactctcccttatgaaagcggatagcaggagcccatacacctttcccatgctgcgctttatcgaaaaactctttgggttcctgtaccggcagcgcataattcaccagcgaccagtttaccagatcacgggaatgaagtataggaagtcccggtatgcaattaaaactggaagccgtcatatagaaatcatctcctgccgcacatacgtccggatcggaatagtcggcataaagcacagggttctgataagtaccattgcctttatcagccacccaggtccgggatatttcctgtgcactcgcccaagtacagcaagccatcattcctgctataaacagaatctttttacgcatattaccttactaatcaattcattcaaacatactaatcgttattcctaaaaacaggttctttttaccttatattaaaaccaatctttcaaaaactgaatcctttatctcttttcaacaatcttattactgacctatttgcttatatatacgaaggggatcaggtaaatacctaatcccctcgcaagttttttctatatttccattaaatagtatttgttcaatcactcacggtacatcatgatagttccccatcccaattgatcattacctaatgatattcctcgcaaatataaaggctattttggagaatgcttaaaaaaacaaggtagataagagtatcaaaggagtgtaaagtataattctaaaatcaaaaactatagattaacatttattatgtcagcagatttatagagatagcagtaaagagagagtttacatatgcatatatcaatctaattatcaataacttactaaaaaatcttcatcttcgttactgacacaactgacaactgacacctttatgcttattttcaaagtagataaagctataaaaatagacaaaacgtataatatatttatcaaatcttaaattttggtcctaatatcctcccgatatctcctttcatgccacaaatcaatatatataaacataaagtatgattataaagtactgacagttatatataaaaactaaatatatcaagaacaaagctcttaatataaaatccatatatcattggttatcaataaataataaagaagaaattctttaaatccactgacaaataggctctaagtggcagttgtcagtggcagtcgtggcaacaggcctccaatacagtattaaattaatacataaacaataaaacagacagcactacaaagatgatgaaaaaaacaagtacaagagatagatgaaacatgtagaacactcaggtaagtcaagtaccagagatagatgagacaagtactggatacgacccaaagatgtactggataagggtgaaagatgtacaggatacgaagaagagatatagtaagtatcccaccataacacacaagtacccaattacaagcagcaaatcaaagtaccgcttcctgttttattcatctttagccgtccccccgatacttatttataaagtaccaatccaaccgaaaaatataaaaaaactattattataggagttctttcatcaacaatttcacaaaaacgtcgtatctttattctcaattaagaaaggagtgatatggatttacgtacagcaaacgtaactagatatattcttcccctgcgggaaggcggatcattgccggctttggctgaagcggacgatgagttcaaatatgtcgtaaaattcagaggagcagggcacggaaccaaagcccttatcgctgaattgataggaggagaaatagcccgtactctgggcttcagagtaccggagatcatcttcctgaatttagacgaagctttcggacgaacggaagcggatgaagagatacaggatttactgcaatggagccgtggattgaatatcggtttgcatttcttgtccggagcgttgaccttcgatcctgtcgtacatcaagtggatggtaaaaccgcctcacagattgtatggatggatgcttttctgacaaatgtggaccgtaccatcaagaataccaatatgctgatgtggcacaaagaattatggctgatcgatcatggagcttccctttacttccaacatagctggaccaactggcagaagcaggcactcaccccgttcgtgcagataaaagatcatgttttattgccatttgccgaccaactggaagaaacagatacggcattcaggcagatactaacctccgataagatacgggaaatagtcaataccgtccccgacgactggttgaactggacggaaggacaggaaactccgcaagacctgagagatatttatattcaatttttagaggaaaggatcaagcattccgaaatctttgtaaatgaagcgcaacatgcaagaaaggcacttatatgaatacgcaaccattcgtttcgttcccaaagtagaacgtgaagaatttatcaatgtaggtattgtactgttctccaaacggtgcaaatacctcaaatcactttatacgatagatgagaataaactgaaactgttttcttccgaactggatatgaattgtctgaaagaaggactgcatgtcttcgataagatttgttcgggcagcaaggaagggggcatgatagcaagcatggatgtccccgaccgtttccggtggctgactgccgtaaaaagttcatgcatacaagtgtcccgcccgcatcccggattttccgaggatttggatgccaccttggagcgtttgttcaaagaattagtgctttaaaccattgatcatggaatttatcaaaataacggagcaaccatcgctctatgatggcctcgacaagaaatcggtaaaagagattctggaagatatcaatactgaagaccataaagtagcggatgccgtgcagaaagcaatcccgcaaatagagaaactggtcacattaattattccccgagtaaaaaaaggtgggagaatattctatatgggggccggaacaagcgggcgtttgggagtactcgacgcttccgaaataccgccaacattcggtatgcctcctaccgtagttatcggactaatcgccggaggagataccgccttgcgtaatcccgtcgaaaatgcggaagatgatatgtcccgcggatgggaagagttattgcaacatcatatcaagagtgaagatacagtcatcggaattgcagcatccggcaccactccttatgtgatcggagccatgcgcacagcacgggaacacggaatattgaccggctgcattaccagtaatccaaattcgccgatggctgccgaagctgatgtaccgatagaagttattgtcggtccggagtatgtgacaggaagttcgcgaatgaaatcaggtactgctcaaaagatgattctgaatatgatcagcactactatcatgattgagctggggcgagtgaaaggtaataaaatggtcaatatgcaattgagtaaccaaaagctcattgatcggggaacgcgcatgatcatcgaagaactccatctggactacgaaaatgctaaagcacttctgttactacacggttctgttaagtctgcgatagaggcctatcgcagacacgactctacttatcaggagtaaaatgcagtgcagcaccaccggaggactttaacttcaaagttaacttatctccggcttttatcttcttatgagtggtacgaacctttgtacgtgtattcaatttgtcgtcatcttcgtacaagttgactctatatttcgttcccggtttcaaaaaatccgtggttaacgtaatggtacgcgcttctgtatttgtcattgctcccacaaaccattcttctccggaacggcgggcctgcacgatatattcacctatttctccatccaacgcacgactttcatcccaaacagtcggaatggccttccaaaactccagctcctcctcacctttatacatagcaggattatcataccaaaacataaattgcaaaggactgtaatatacggctgccattgccaattgatgtgctttggtgtttttcacacgaccattaaagtaacagagtgtataatctcctgcacccgcaaggaaacgggtataagggagaatggtattgtgcgtcgcatccggcatctcttcgtttccaccgataccttcttgtgtcatcaaattgggataagtacgactgaaacccgtcggacgatattcatcatgaatatccaccatcatttcatattccgcacatttacggatcgcatcatgcaaccatgtactccaatactgattaccaatctgtacaaaaccgaatttaattcccttcaatccccattttttatacaatggcaataaagaatccaactgttgtaccaaagcgcgttgattgacatataccattaatccaatgcctttagattcagcatatttacataaagcaggaatatccagatccttatccggagaaaccgtagtagcatccgaactcattttcatttccggaccataccatcccgcatccatatgtacatattgaatgccacgttcggccgcaaaatctattccagccattacttcagcttgcttcagcccggaacggaatactttcccgggcttaatccaagaagtatccgacatccgacagggagtatttaagttcaaaaccagatcagtatgattgatcaaatcgaccggacgttcggcagccataataacacgccaaggggtattgtagggagaaattacgtcaacactgctatacaaactagtttccagtgttgaaggcttttctgcagacagacggaatttaccacgagcataatccaccatctccgcttccaataatgcaacggtcagtccatcaggcaatttcatggtcaaaggacgttcactttcctcttttccccaccctgacaggggacgaagctcataaggaccttgtgcccaacgttcatagtaagccattgtaccttcaggcattgtgaaacttgtctgttcacctgtaatatgtaaaaacagtccattggtcgtttccggaaaatgataacggaatgccactccttcgttataggcgcggacaataatattcataaagtagtttttacgtttgtcgtaaccgccttcagtcgtcccttgtccttctcctttacgaaactttaaagtcatttcattataacagtcccgaacttcggcacgttctccatatacaggtttccatgtttcatcgcttttccgatggtcagtatccgttagtttcagattctcgcaccaaaaatggcaggtatcgttcggtactcccaatgccgattcaaacagctgattctctatctgtacaccgagttcactctcctccactaccggacgattcttatatgtcagcgtataatacattcgcgcattatcctctcccaacgaacgctggtaaaaggtgaaccgatacgctccgtccggagaagtcagttcctgacgggtttctgtcatcacattctgtgcctttgtcaatgccggtattgccaacagtaaaagcaagatacttttcttcattctatttaaattcatgtttatccgtttttccaatatatacgaacgaattaattattatactcaatctgccccgcaaagaaacactgctttgctttcagttctttttatagaagtctcttttcttccttatatttctgcaaatataagcaaacatcttgcaaaaataagcacaacattacattcaaaaagcagctacttttgcatcaattcatataagtaataaataaaaccatgaacgaattatttagtattgccggtaaggtggctgtaattaccggagcaggtggtgtattgggaggaaatatcgcccagcactttgtacagcagggagcaaaagttgtagctatcgatatccgtcaagagcaactggacaaccgtgtagcggaactaaaacaatatggtcaggatgttatcggcattatgggaaatgtactggacatcgccagtctggaaaaagtagcggaagagattgttgcccaatggggacagattgatattctactgaatattgccggaggtaacatgccgggagcgactcttgaaccggatcagaacttttatgatatggacatttcctgttgggagaaagtgaccagcctgaatatgaacggtacagtctatccgtctatgatctttggtaaagtgatggcaaaacagaaaaaagggtgcattatcaatgtgtcttctatggctgcttatagtgccatcacccgtgtgccggggtattcggcagcaaagatagccgtagccaacttcacacaatggcttgccagtgaaatggctctgaaatatggtgacggtatccgtgtaaatgccattgctcccggtttctttatcggcgatcagaaccgtcgtgtgcttatcaatccggatggctcgctgactgacagaagcaaaaaggttttagccaagacaccgatgaaccgttttggtgatattaaagaattgaacggtgccgtacaatttttgtgtagcgaagctgccagctttgtaaccggtgcaatgttacctatcgacggtggcttcagtgcattcagcggtgtataaagaggagaaactatgatggaaaaaacatggagatggtttggcaaaaaagacaagattaccttgccaatgctccggcaaataggtgtggaagggattgttacagctttgcatgacgtaccgaacggagaaatatggacagtagaagcgattaatgagctgaagtcctatatagaatcatacggactgcgctggtctgtagtagaaagtttgcccgtatgcgaagcgatcaaatatggtggcacagaacgtgaacagttgatagagaactacaaagtaagccttgccaatctgggtaaatgcggagtaaaaactgtttgctataactttatgccggtcatcgactggatacgtacagacttgcagtacccctggccggacggtactagctcattgtattatgaccgtatccgtttcgcttacttcgacataaagatactggaacgggaaggggctgaaaaagattatacggaagaggaacttcataaagtttccgaactggatcaggtgatcaccgagaaagagaaggatgatctgattgataccattatcgttaagacacaaggatttgtcaatgggaacatcaaagaaggagacaaagaaccagtcgtcctcttcaaacggctgctaactttgtacaaggatattaaccgtgacatcctgcgcgaaaatatgtgttactttctttctgccattatgccggtttgcgaagaatacagagtaaatatgtgcgtgcatcccgacgatcctccatttcaggttctcggactgcctcgtatcgtcaccaatgaagaagatatagcctggttcttgaatgctgtagacaatccacacaacggactgacattctgtgcaggttccttgagtgccggcgaacacaatgatacccgtgaattggcaaagaagtttgctaaacgtacgcactttgtacatctacgcagtacagccgccataccggagggaaacttcattgaaagttctcatctttcgggaagaggacatctgattgatcttatccgtattttcgcaaaggaaaatccgggattacctatgcgtgtagatcatggacggatgatgctgggagacgaagacaaaggctacaatgccggatattcttttcacggacgtatgctggcactagcacaggtagaaggtatgatggcagtggtggatgatgagatagaacatcagataaagttctagcctgctattccttattaaacagaacattgcaagaggaggctgtctcgtatgcttgaggcagcctcctcgtatagtaatatttcattaagagaccactacagaagtttactgtagcgtgtatacatcactttattctcagtccatttacgaaatctttcttattcacattcaattcatccaaagcagtcactttcttaccattcaacacgatgttttcgaataagatattctctattttcctgttgctatcataaccttcaatcaaagaaggattaatatatttccccgtacaagagatattacggaatataatatctttcacacctcgtcctggtcccgtgttatatttttgattatacatcacacgcagatgaaacaattgtccctcctgtatattctcgactcgtatatcttcaaaggttatatttcttgccaaattatgatcacctacattaatagccatacagccttgataatcccgatcatcttcatcatgttccagaatatcaatatttttaaataacatattctccaatacttcgtcaccagtttctgtatttccgtgagtacctatattaataggatgcgcaatatctgcccaaagagtagagtttagtacacgcacattccggcaatcaccataataattccagcgatgagtatagaaagcaaggcaatcatctgagttacgtaaaaagacatcatcaatcagaatatccgaacaagacataaaatccaacccatcactccagccttgataactaaaagatttcaaattcttaattgcaattcccaaagattggccgcctgagacagtatagtgccggggattaattactgtgatcccatcaatcaatacattctttgaataagcaactgaaataccttgttgaggttcgagcaacataccatgccccaaaattctcacattttccacactatcacaattcaaacatccttttaatacagctcctccttccagataaacggtagaattagagggaatacgaaaacattttccttccttatctgtcggttcatgtatgccggactcgaaatatattacgttcggatcattcctgtcgggtacatcctttataatgggattggcaaacaaatgcaaattattcaaacggtcaccattaaactctattgatagtttttgaggtttatctattgtaaataaaagatagtttccatcgatctccggtttgatccctttagacagaggccgtatcacagccgaacggatttctccattatttttccgaacaaggatatccaccttaccggaaaaatcaaactgcaccattgtagcgtctgacttggtgtccatgtctacctttacattatattcgtaaagatctatccactctttgtctcctgcctgacgaacgagtacagtataatcatcattatgacgagcatagtagataccattggggacagggtaaataataatttccgcttgtaagtcattccatccaaagatagcaagcaggaacattagtgttattcttatcagtttcttcatacctatatattactaatacattagaaaaagtatatcggtatctcgccttatttcagttgaaataccgatatattctattaattacttatcgcgcaaacattagtgtacccagcccgagtacatcatagccaccagagttaacgtcataatagccaccgcctccttcgacacctacatactctgtagctatttgggtatacttcaacaagtcatccttcacatttttcacatctttgtaatgataatacggaagtgcccatattgcacgctttatccatttgccaccaccgagtaccggttgttcctccggaatcgggtacccccatgcactttgtttctgccaaatatatgtggtgaagggtacctcttcttcagtataattacagcaagcagcatattcacaagctctcaagaaaaggttgtcatcgtatgcaaagaaatcatctccctgactccaggcaagctgacaaatcactcccatcaagcccacgcacattaaagtatgcccctggtcacgaccgctctcctgccactgcgcaaagttatattccggcgcatagtcatgatagatagcccggcgaagacgtccgtttgtattaccttcctgcaaatgactgattccttcattataaatgtcgcgacgatcagttacaatgccaatagccatcttggcagcaatattacacaaacaccagttagcccaataatgcaacggattagtatcatgatgacgtttcagaaagtcatcatttgccggataaaagactttcaccagccaatactgaaatgcacgaaaatcatcaggagcccatccgttataatctctcaacagttcaccggctatggcgaactcatagccataaagtcctgctgccaatgacagattcgaattgcccgtcacaccaacacaagtctgcacccatttatttaagttagcaaccgcttttgccgcatattcatcatctccttctattttccagcgtaatgcttgctggtatgcgatagaagctcctctggctgcattcatataattctcatcccctgaaacgccgcgttttatccagtcaacaggccaagtttccgtatctttctgtgcaaagctactttcttccaacattttataagcagaaacccaaggttcctctccagcttccagtttttcacgaatacgtgcaaagtcttcttccgcatgaaatccaggatgcaccataggttctgcatcgtctttcaactctacctgtaccaaatccagttcattctccggaagtggaattttattcaagtcggtttctacaccgggattcggaaggtctacaccgtcaccacatgccgtgaatgacatgaaggtgaatgcagctgctatataatatatctttttcataatactactaattatttcactaattcaactttaaagctttcgatcttgacatatttctgtttggctgtaatcgtagaaacaaatccgatagagactatggacgatttatccagtgtaaataatgaagtagaagcatttcctacagcactgattcttacattggcttttcctgtctctacgtcatcagtattcgggatggtctctccttcagctacaactatatgtacagatcccgaaatatttatttcgcgtacattaacagacaccttatattgtccggcagataatgcggtcacttgccatatcttgccattgctcatggtggtcgggaatccccaatcagtctgcatagcaagtgaagtcacatcattttttttgttctgatattgcacgcctaccaatttaccatctgccaaaacattctcaacttcccagtcctgcggtttgtgccattccccctgtcgggcaacagatccctctattaccaaaaattcatgcttgtaatttttcaaaacatacggtgtaatatctccatcttcaggaagaagctgcagatgatcgctcactataggttcatcgataccatcaaacaccatcgttacttttccgcctttgaatccgttcgggacattcacagcaatggcagtgggagtaatactattaatctcagccggtactgttaccccgtcaaaagtaacggttacagcatccttgcttgtgccaaagccatgtcctgcaaatgtaatcttttctccggataccacaagcgtaccataaggatatacataggacgagtttacagaaagaatttccggagtttcccatacttcaaacgtatcattaccgttcattgagatttcagtatccagaataatcaacttaatcgtattctcaccttttgtaagccctttcggcacattcactacaatgttcccttcctcattcagcgtgacattgttacaagctgtttcgccgaataaaacttggatatcttccgctttcgttccaaagtttttacccttgatgattacttccgcattaatatatccggcagagatggaaagaccagttacttccggaggcggtaatacggtatatgacaatgtttcttttatatcttcaaacgaagtactgacaatcacttgatattcgccggcctccagatttgccgggactttcactctgatttccgtatccttagcctcgccaaccagttccgcttcaacaggttcgttctttccttgctggaaacagacttttacaccacgcaactccaaaccttctttttctagtatttccggattcagatgagcaccggtaacagtcacttcgctacctgcgaaaccttgcgacagagaaagtctctccagcgaagcatgttccaaaacagtaaactgtttcgatacatttacgttcttatccattattgcaagagcgatttcaccacttttggcaccagtcgggactttgactgtgaatgtttcatcccccggctcattcatcagcagagccgtttccgtctgtccggcaaacaagatagtataataggctgaagaaacgcccaaatcatgtcctgtaaaagtaatctcatcacctacaaatccataaacaggcgaaatatctctgacacccggttcgccaagcacatcgtattccaatcgggtatctactttctgtccgtatacaactaccgatatattccccaaagtagctccttctggcacacgtaccatcaacctctgatcctcacaagaaatcagttcaagttttgtttttcccagatacacttctacatcttccggaaccacaccaaagttagttccggttatcgcaaattcagtatcaacataacctttcaccggagaaatttcagtaactgtcactaccggatcctgattggccaagtgaaccacctcttcctcatctttatcacaggatactattgataaagaaaacaaagcaaacagcaaataattatataatttcttcataaatatattcgttttacgtattgtgacttttattattcaagaatcagtttcacattggtaaccttgaaatatgtattacttgactttattgtaacgacgaagccaatcacaatatcagtagcatcatccaatgtaaaggtggaagttttcaatgtacctgcagcctcaccggtcccccaatcactgaatgtcgcaaatacaccattctcgggtgtcatagcagacactttgtccacgtcaggaatactatttccgtccgtacctttcaccaagacagccgctataccgtttccgtcactattcggcacgtatgtacccgcatacgttacttccaatcggtaacttccggcacgcaaagtagtcgcctgccatacccttgcattatcaagtttatcttttccccagccactttggaaacagaggaaagttgttccgttctgtgtctgaagacatcctgtcggattcttcacactttggttccaatcatcaggatcagtccagtcgccggttccggaacctataaacggttgtttatagttcttcaaatatgctactgtcacatctccctttgtattcggattgaacatcacactgcctgtaatctcataaccgcgaatcgtcacaatcacatttcctgtcgaataatcctccggggtaattgcttcaatagtcttatcatcaatcaagttaaaatcagcagccggcgtaccattaaagctgatggaaacaaccgacggatcgttaccgaagttctcacctttaattgtgatcttgtttcccggctctgcaatacctgttccggcattattatccgattgcatggattccacatacggtgtaggcaatacggtgtattgtccgatagtacccacctcattggtccagacttgcagggttacttcaccactggtcgcattctcgggaactttcactgcaatacggttattcttgcacataacaatatcagtagcctgtacccctccaaagaatatcttcaccgctttcggctgatctccgaaatctgttccggtaataacaacttgcgaggtgacatatcctatgtttggagacatccctgtcacttgcggcatgggatacacatatttcttcaactgcgggtcctgctcgcaaccggtaaaccatataatgaccgttgtcaagatgagcaaacctaatatatttttcgataaatgtttcatatatcctttactatttaagatttcattaattatcaattatatcccggattctgtttcagattcggattcagattaatctgattttgcggaataggatagagataatgcgctttacgaagatggctgttcgatttaggtgcaagcaatacacaggacaattctccgtctcctgtcgttgtttgttcttcaccataacggtaagacttgttatcgtaagcgtcagtgatgacagaaccggaagcatctttatacggagtcctatagcccggatcgcccactaccattcccaaacgggattggttaagcatactctccaatacgccccaacgtttcaggtcgtcataccggaaaccttccaggaatagttctactgcacgttcacggcgaatctcttccagcatatccagctgatgatctgttacctgcttattcgtcagagaagctacgccggcacgtccgcgcaatttattaatcgaaacattcaattcttcatctgttatagacccatgacgttccatcagcgcctctgcataaatcagataaacctcagccagacgaagtacaggataattagcagattcttctttatcttttgtaccgggacacatgaatttctgcacaccgtaacctccgaaaccaatagtccccgaaagtttaataactgtagtaggtgctccgacgtaagagttcatacgataatcacgattctgaaactcgtctcccatattatgatatcctttaaactgctcgttaccggcaataggaagtccatttgtacatacaaacatatctataaacttacgggtcggatatatataaggcagaatatttttattcaattcaatcgcaccggcattcgcatccttatcaaacactgaataaagtataaactcctgattcgtatcacgtccatgcttcccgggattactatccgcactttcgatacagaataaatagcggttacttaagtttttcattacatcttcaccattataattccataatctgaatgccgggtcgtccattacactttttgccaaagcgatcgcttcgtcaagaaattcatttatctggtcacgcgaaggtccggaagatccttcaaaatcggtcgatgtaccattatattttctccatgtagcttcataaagtaaaacacgtgccttgaaagccttcgccccctgacggctgatatgccccttgtcggcatccgcgatattttgctcgataggcaacccggcaattgccttgtcaagatcggataatatcaggtctaccacctcataacggctgttacgcggagccttcaatcgggagtcccccgtatcatacggaacgagaacaatgggtactcctccaaaatgttgcaataaagagaaataattgtaagcacgaaagaagtgagcctcactgacatattcctgaatctctctcggatcgccagcatatgattccgcacgttgcaacaggatgttattcgtgcggatactattataaatatcccaacaagcatctttatcgtttacaaccaatgctccgtagcctatatcagactgctctccgttacggctggtcaccagatcggactgaagatccatatgccctgttatgccggagcgccatccgaataactgcgaataaaagccgttggaaaactcacggaagtgtgtgggagtcttgaaataaacctgatctgttcgtgaatcgagcggttccagatcgaggaaggtatctgcacaggaagaaaaccccatcatgcaagcacaagcaataatatatattatctttttcatacgattatccatctattaattgaatacaaattataaagtaacattcagtccgaacgaccatgtacgggcaaacggatagccgctggtattggaagcggctcccatctccggatcgaaaccgtcacgaatactggttgcttcccacaggtcgttgccggagaaataaacacgtatcttttccaacttcaccttacgggtccatacctgtggcaatgtgtaacctacaaccaaagtcttcagacgaatataacggctattctgaagcatgaaatcattgttctgatagttccatgccgcgcgttgcgtactgttagtcatacgtggatacttagcattcggattatcctccgtccatgtctgtccaaggaatgtagggttctgattggtatagagcgtccgaaacggataagccatccagtcgttacgcatgatatactgcttcgcaactccctggaacatggcattgaaatcaatacctttccacgaaccgcccacagtcagaccatacacgaagtggggattggcgtcgcccataaactgtaagtcactgttttcattgccgacatccgttattttatagtcgccattcaagtcaagacgctttgtatcgccgggacgcaactcattatcagttccttttcctactgctcccatcgagttgctgccggtatataaagcatagaagcgatccacttccgcctgatctttgaaatagccatcggtacgatacaggaaaaaagagttcaacggatacccgttaacagacttattcacacccgctccataagagtccgcaccttccagttctttcaacatactctttgtgtcgccaatattgaagttggcataatatgagaaacttttaatctgatcacgccagccgatagtaaattcccatcctttcacattcagatgtccgctattcgtcttaggggccttaccaccgagtactccggggaaagctacttctgacagcataccgatattgtccttgataaaataatcaaatgtagtagtcaaacggctgtccaggaaatgcaggtcaatacctatatttttttgttctacccgttcccaagtacgttccagactgatcaatccattgtttcccaatcctgtactgacctgctttgccggactgtatccaaaagcggtagtgccctgtgtaatagccgttaaataatcgaaatcccccagtcctgcatcattacccgaatttccatagctaagacgaagtttaccaaaattgaccaccgaagtgaccggcttcaaaaattcttccgaagtaaatacccaaccagccgatgctgaaacaaagtttttaaatttatgtcctttggcgaattttgaatttccatcacgacgtccgatcaattctatcagatacttttcagcataattatagttcagcctcatgatgtaagaataagaaccattttgtccttttcctcccccattgccttgctttcctgtggcaagattcagatcatatacccccgaatcttccatcttttcacgggcagtaaccatatctttccatacccatttctcagcattgattcctaacataccttccagattgtgtacttccgcaaaggtgcgtttgtatcttaacaatgccgagtaatattggtattgccggttattggcctgcatcagatatgccggattatgaatatctttcagattcaagacatcctccgggtaaagcaatgactgctgggtatttttaaccagatttaatgccggatttccaaaccagtcatacgtctgtacctctctcacataacggtcgcggcgatattcttcattttgaaacgaagccattccctcaaaactaattcctttccagatatcaacgatcgctttcacatctatacgggaaatcaaactcattttttcgtcacgaccgccatcagaagtagcagctaccggctggcggtcgcctaccgcaccaaaattagcataccattgcccatacggattctttgccgggaaaaaaggaggttcgtttccatacatagtggcatcgattccggacgaaggcatttcggtatccgtcttaatcatatttgccgaagtctccaacttgaaccagtcagtcagtctgataccatagttcaaacgcaggttcaattgcttctgtccatcataagccgtggcaaggttagcctgattatcggcataggccaaagaaatacgatattccgacttttctgtagaacccgacagactcaggttgtgctggtatgaataacgacgggcaaacatttcctccaggcgattggcattaccgacaaatatgtcatatccccagtcttttgcattcgtgtgatagattccttctatcccctgttgcatcttcagcatattttcttctgtactccagttccaccagtttttcactttctgctctttattcgcttcaatccacatcgaagcatactcctgcatactcggtgagaaagccataatgccgttagtagtgaaacgcatattgaaattataatccaccgtcgtctttcctttaccctttttggtggtcacgagaattacaccgttggcagctttcgcaccataaatagaggccgaaccatctttcaaaacactgatattctcaatatcatcaggattcagattctgaaaagccgaggcattcaatgcaggtactccatcaataacgatcaaagggctaccgccattgaccgacgtcgcaccacgaatttgaaagttcagcccttcattgcccggacgtgaagaagaacgagtcacaaccaatcccggagtagcaccctgtaacgctgctccgacatttgttatggcacggctctctaatattttgctgcttacctgttctaccgcaccggtcaaagtcgccttcttttgtgaaccataacccacgacaacgacctcatccaaggcattattatcttccttcaatacaatcttaaaatcggaacgtccattcaggttgactacctgatccacgtatccgatataactaatcttaatctgttttgcatcattctggacattcaatgagaaattaccgtctatatcagtaatcacaccggccattccgccgactacgactacattacaaccaatcagcggttctccattagcatccgtaacagaacccttgattgtacgacctgtctgggcgacaatcatgctttcttctacagattcgtttgcatagagcactataccggatgagccacccagcagtatggcaaaagccaatacgactcctctacgacatgagaatttggatttaatttccataatactattaaattattaaagttaatatctgcttcccccgaatccggtattcaaccgactctggagaattcttttttcaaataagtgcgtatcgttttacgggccagtagcaattgcccttccaccgtacggggagataaagacagtctgccggcaatggcgggacaggaaagttcatgttcgaaacttaactcatagatccgacggcgtttgtcaggaagagtccggatgattccgtcgtgtatctttttcagttcatgatagtgaagtgtttcatcagtcgtgttccgtccttcgtctttcacattattatatatataagagacaaagtcttcctgcttataatagcgacgtattttatccgtcacgatgttacgggcaatagtgaaaagtaaagaccataccgtatctttgtttacgaaaactctgtactcccacaaacgaacaaagacgtcctgtgccagatcttccgcttcatgcgggtggcagattcggagagcaatataattcttgatatactcctttttttccagataacattctgagaagaagtcgtcaaatgtagcttgctgtttactcatggcattaaatttatccgtttaacgatggtacaaaaatagggagaaggtttataaacggatatcagataagtaacagatgacagcacaatggtaacaagtgtattttttcatcaaaacaccccatttcatcgaagattcccaatggaatacaagaataaaaaaaggagatcgttacggttaacgtctcctttgtgctctaaatgttatgaatgatattacatcattccgaaaacaatggcttacttttttgactctgcctgaaagtccggtatacgtttcacgtccgcacctttcatcacgccttttttaatcgcttcattggtttcagtaatttctttcttcacacgcttatagtattctttcgtcaagcctttttctaccgcatccgattctgtggctgcccagaagtattgataatccatcagcatcaaatccggtgctaccactttaaagaatatactatctccggcaaacttttcacgcaaatcacctaaatagatggtatctgccgcattaactacctgatcactcgtgtttttttgtgaactactaccaccgcaagaagataacatcaatcctcctaccaatgaaattaaaactaagactttcatactactattatttattatactaacgattttgaatgacattgttaccaagataaatgagcatcttataacaaactgcacaaaaatagtaatttatattatcacaatgatcattatttcaatctttttttccataatcctctgcatattgcttgggcaacacgccaaacatttctttgaaacacttggcaaaatagctggatgaactgaaaccaacccgattggcaatctcaacaatcggcaactgacttccctgtaacagttgcgccgcacgcttcagacggatgctccggataaagtccgtaggggtattgcctgttatggactgcagcttccgataaaggctcatgcgcaccattcccaaatcgcggctcagttcctctacgccatattcgggatgatccatgttcttctcgatatactccagacatttctgaataagctgctcatccagtgacgtgatagtgatagcactcggattcacttctatgtttttgcggaattcctgtttccgcttttcctgctgttctatcaacttctcaatgcgtaccatcagcatatcaaagttgaaaggcttcgacatataggagtcggcacctacctcataactgttgatcttaatatcatccgccgtgcgggctgtcaacaggatgaccggaatatgagaagtctgcatattcgttttaatccggcggcaaagctcaatgccatctactttcggcatcattatatcactgataatcaaatccggattctcatcaatggcacatctctccccctcttccccgtctgctgcctccacgatttgatagaagtcttccagctgctcttttaagaaagtacggaattccttattatcttccaccaataatacttttctccggctgtcgtccgctgagagcagcacgccggaggcttctttctctttgtcatccggcttctcatccgttgcctcttcaaagatatctcccgactccggtttcaagtccataggtaaccatactacaaatgtagaaccgcgatccatccggctgctcacggtggtcctgccttcatgaatattcacgtactctctgaccagatgaagtccgatgccactccccatcttctcatctccttgattaccgacctgatagaaacgattgaagatataaggaagatcagattccgaaatgccgatacccgtatcggagacttctattctgacatagtttctctgctctatttcttcggtggataaaatcagattcaccgtaccaccttcggaggtaaacttaaaggcattggatagcaaattgttcactattttgtgtaccttatcgctgtcaaagaacatataaagaggtctgtgtaccgtctgactgacaaagttaagatgcttctctaccgccatcggcacaaagttattataagcggaactaataaactcttccatatctccattcatcagatgcagcttttcccctttcatttctaacttacgaaaatcaagcagctgattcactaaggacagtaaattctgcgcattcttataaatagtacctaattgcttctttaccgcttcgtccgagatacgacggatcatcatatccagcggagtgataatcagcgtcagcggagtacgaagttcatggctgatatttgtaaagaatcggaatttcatctgatccagttcttctttctgtttcaacgcttcctcctgttgcatacgaaccatcttccggtgattacgacgattgagggcataaatgaagccggccactatcaagacaaaaagaataacataaaagatacgagccgccaatgtatcccagaacggaggacggatcacgataatgaattcagactccggtccccatacacggtcatttcccgctgccgacacccgaaatacatattcacccgaaggaagattgttgtacacagcacgtcccagaccattctcaaacaatgactcggtccactctttatcaaagccttcaagctgatagcggaaagaagtctgagaaggattcgagtagttcagtccggagaactccaatgtaatgaaattctcgtcatagtccagcagtactttatccgaataactaagagctttatcaaacaagacacgtccattgtactcttctcccgacacaaccggaacattaaaaagccggaaggaagtgatcaaaggcgaagtaatataatgattatcaatcatattctccggagagaaagtgatgaagccattgatcaatccgaaaaagagctgattcttgcgggtaaccattgaagggaaattaaacagatcatcctgacggatttccgcttccgacaagtagctgatgacgtgaaagtcatacttatcctgtccccgctctaccttgattttgtaaatagaagtcagggtagaaatccaaatatcatgattctgatcttctatcacgttcaggatcacactggaaaatccttcctccttccccaatgtgtaactcttgccatcatgagtcagaatattcaatccgtattgggtagcgaaccaaagtgttccttcatgatctttcaggatttgattgtatttaatactgccccggttgaaaatagaattagattgtccgtcctgctccggaatccatatttgatccttcgcaggatcgtatatgtacaatccgttatcgcttccgactaccagcctggattgcttgtctatggccagcgcattcacaactttatattttttcagttccggaaatcgctcggacaacaaactgatctcacccgtttcggggttgaactgaccgactccgccatatccgtagatactgatccacaaacgtcccgaagggtcttctataatagcccgtatattactgaaatccaattcattctgataatcagtatccggataagcatatgcccgcactttaccggcttcaatgcagtacaaaccatcgtgataggtacctacccaaattcgtttcttactgtcttcatagagtacacggcaattcttctgattaaattctttataaagtatatccatgctatgtgatttcggatcataccgataaagtccctgtgcagtccccatcagaatgtcccctccgaaggtttcaagcatacaacggatttcttctccgccccatgctccccgaagcagctttttgttgcatagagtcagtttgttcatgctgggatgataatagcagactccctgattgaacagtcctatccatacagcgttattctccttgtcacaataaatactatgaatgccattgcggatcgttttgccggacaacaaaggaatatctatgatgctgttcacagaaaagttgtgcatatcaatcacataaaatccatccagaaccgtgccgacccaagcatttcctcctttgtccacatccatcgacgtaaaccatgaataatgtcccagctgaatattcgatatctgattccatttcttgttaaagacgtcatagtagcctactccacgatcccacattacccaaaagtccccattatccagtatcttcaatatcacccgatcatccggtttgagctgtccttccagaaagtcaacctgtttgacaaagcgtttcttctcatgatcgtagcaacgcatcactcccttctgatgaaccatccaactaaacttgccatgactctccactcccagtaatccgccataatactcgataaattcatctttcctgcagatcagttccagcgtatccgtctctccgtcatacatatagacaaaagaggcgggtgtcaaaaaccaataatgcttttccgaatcaataaagacatcggcgatccgttcttttattccaaattgaagcagtaaggaatctacattataaatatactgttcggtagttaaatcgaaaacgcgcaatgctccccgttctttcatccacaaacgcttatcagcgtcaacgtattgttcgggaataatgtgattgtaggaaatcggatattccccacgaaggttgaaaggaaagtttgaatagttcgatccgtcatacagactgagcaatacggtagtccggatacctatccgcccgtcgggaagggggaaaacacttttcacataattatccggcagtccatcggtcactccaatgtaccgaaagacgtaaggggattcctgcgaatgcaaatgattcgcaaacagaaaacctatcaataaaatgacaaacagatatattcgtgtcttcatggcggttgcttttcgttagctaatatacttatataatacgaagcagaagtcaaatccccgtatcctgccttacgattatttttccggatgaaagcaaagatatatattttctgcctaacattatttaccactaccagaacttatttttcaaaagtatctgccatccgcaacaacagcaaatccggagaactacttaacctttatattctctatatactcattgctgacgaaatcattgatattcttcattctgattccatttatcatcacttgctcgaaagtaacgttcctcacacaacgtttctcgtccaatcccttgatcaacgacggattctcgcctaccccttcataagtaatattgcggaaaatcacatcttcaacaccgcgtcccggctgtttatcatatttgggattgaaacggacactgatatgaaataaccttccttcctgaatgctttctacccgaatgtcttcaaacaagactttacgtaccagattcttgtcgccgcagtctatcgtcatacatccctgataaagaggatcatcctcatcatgctctaggatatctacattacggactgttatattctctattatttcaccgacttcatcttccggatttccgtggcctccgatattgatcggatgagctatatccgcccataaaatggagttctgcaaagttatgttcctgcttccaccataaaagttccagcgatgggcgtaaatggcgatacagtcgtcactattacgcatgaagacattatctatcagcacgtcattacaacacatcagatcaattccgtcgctccatcctttgcaactgaaagatttcagattctttatagtcaatccattaacttctccgccaaagactgtgtaatggtcgggattcactacggtgattccatcaatcaatacatttttagagtgagtgacttcgatgccacgaatcggatggtcgagtattccccgacctatgatacgtacattctccgaatggtctatcagcaacttcgcctttaccactgctcccggagccagatagacagtcgtgttggaaggaatccggatttgtgtattcggcaaatccagcgggcggtggatgcccgctccgaaatacatcaccgtatcattgctctccgtatacgtttcagtctccagaggattcgcaaaaagatgaagattatgcagacggtcgccgttgaactcgacagataaatattgtggttcttccaatgtaaaaagaatagcattacgatttaccgtatgcctgatccctttcgccagcggacgaatattcacatcctgaatcaatccattgttcttttttaccattacttccaccggactgcccatatcaaactgtaccattgaggcggattgtactttatccatatctacactgacattgtactcgaacaagtctttccactcccctcccggcacgcggactctgaccgtataatcatcattgtgcggcatacccgcgttcattccatccggataagttaccagctgggcatttgaaactgtcgaaagaattatggaaaatgtcagcagccattttctttttcccgttatcttttttaccatattcatcatataaactgtttatgtcattttattgcagctacagtctattacgaacataaaaggagacttacctatcagcttatctgtttttctcaaatattatcttttgcgtctagaaaataaattggattcccaacagactcgccaaaatatccgtcgtccggcgtccttcgataaagctgaaaatcactccccgcatacatcccaatgagaatccgttgaagaacatcgcaaacatattatatggagcaggaagtaatccgaacgcaaccagcgacaactccactacggcaatggaaacaagaataagaaagcgacgtaatattaatgtaacgtttacgtaactgctttttcttataaatggaaaaagagagggaaagagattttatcacactagaaaccgataatttttacttaacacggtcagaatgattattacctcatgctctctcttttcctatttatgtaatgattcttattgtacagccaataacgtcaattcggtggttattccggattgcatcgcttttccgtcaatcactatcttacagggggcagaagaaagaatataccattttccctgcttcttttcgagcagcacattagcagcctccgaagtctggatactgataccggatgcaatcagttgcgttccgttccccataaacagcgtccggtttcccgcatattcgttactgattacggcatagtccgctttcactttcattccctgataggttgcggtctgcgacgaatccgtcaaagagaaaatatggtcagtacgcccgtttttactttccacacagataccggcaaaatctttcaagccgggctcttccgcatcaaagtaagagactgactgaatagccgaaggctctttccgcgtacttggttcataaacagcgacaaaaggacggttccacgcttctccatgctgccgggcaacgaaggtgagtgtaggctgttcctttatattataaggcatatggggagtccggctcaatccttcggtcatcggtgccagtgcggtgaacacttcccgttccggttctcctttcatccagagattcatggaaatgtcatctccgcctttatccttcatgtcgatggtaaaagtcactttcacatcctgatcggtggcagccactttcttatcatataagtaggaataagcataaagatgggcacctgcgaaagctagctcttcagtaggctgcaaattcaaatccgtgccgtcagcagccgttagtgtcattgtctgacctagattatggtagaaataatcgtgcattttatcgcctccccgttctttccggctgcggaatacatccacataataccctgtctccagaccagtagtaacaatgcccatcagtcgagtctgatccgccctgctctccggctcacggaaagcgacctgactataggtgacggaggtaaatcctttacccggttccgccgaagccggaaaacaggaaagcaaatcgaaagaatgattacttttcatcaccggataactggaaatgccatctacacaaaccgtattatggctggggaattgagagtaatattccgcatagtccagaccgctatacaagaaaagtccgatacccgcatccggtcccagcacatatccttttccgtaaagctccatcgaaatgccattcgcgtgcatatgattgccttcacttgcgttgagagaaatcatcagactgttgcgcggatgcatcccgttgcgctgtaccagccacgatacgttgggagcatagaacagaggagatacataatcctcgattttccccgcctccaccttcgggtccaacactaacggcttgtcctcaaagaaggagttgacagaggcccgtacattcttcttgccacttttttcgctgccttcctccggattcagacatttcagcaaagcggtgaagtaacgttcctgctctttctttccgtttgcctgcgcattctgtatcatccggataaagaagttcgtacttaagtaacttggatgcgtatctccgaaaccacagatcatccggttcggaaaaagatactgcggagtagtcgctactgcttttgccagcacaggcattgcctttaccaagtcatattgcagattgtggtcaaactgattggcgaagttcgcgtagtcattaatgactacactgctgtatcctggacattccgcccatatacccgtttcggaatcaaagccgtaatcggccagcttggtcagactccactggcggatgctcgaacggttcattacgtagtcaatatagtattcgcgtcctttcccgtccgcatactctttattatcttccagcaccagtcccacgttcatgatatatcgtgcctgcaataaatcccagttgttatgggggactccgttggcgatgatattatccgcccatttcttcaatgcgccggcataaatcatcatcttatccggatagttggattgcagataatgatagaggaagtcatacaaagggacaacgatatgcaaagcatcctcatggatcacttcaaaagaagtcagtcccaccagtgtctgctgatgcccgtgattcaggtcaacaggaacatttctgtaataaattcccgtcatataagtatcgaaaacaccggcagccagtcgggcatacttttcttctcccgtcatccaatagaggaaagcggcgtcacgggcaattcccagaatctcacagttcagactctcaatattgcgcccggtcttggacggatgcacactttccagcggacggcttttcagggcattgttgcagaaagtcacgtttccttccgcactatcgtcataaggtactacatcttccaacttaggtcgaccgtgcgtagcggccgtccctcgtgttccggtatagcgaaccgtcggggcaggcgccttctcgcctccggcatggtcgaacacctcacctttcacgtacacttccgttgcatgcgacttccagtacatggccaaacgggataataaccagtccggctgactttccgtacgtcgcgtatatacttccgtccgttctttcagcttgttaaagacatcttgtgcccatgcttccttcttgatcaacttccatgttcctttttttccttccggggtagtcagtactctcggatgatcctgcggcatcttctccggcaacggaatctcctgcccgtgcgcattcaggaaaaaaagcacacataatcctaacaaaattcgtctcatacttccatttcttatttacgtttgctacgtatttaatacgaaaataaggaataatttacctaactggtatcagaaaagctgtttttattttcagcggtacggactgccttcatactccggacattcaagtatactcaaaaagatagcctgcaagcataccacttacaggctatcacaatccccttttttccctttgtatcagggaggcaacttacgtttccccgtccccgccggaacctctcgctgtacatccttgccatcgagctatataaaactcatacaaggagcatttccccattcagacacagcaccgacaggtccccataagccactccacaatgttcttgcgaatctccccaactatcgttggattcatatgggtatccgccctttttcgatgcgaagataatttttttatgctattattatagttaacactgtctattaaaagtgttaaaaataaagatttcataccatacttccgcaagccggcaccaaagaagaatatttattttctctaaacaaagcgctaattccgaacaaagaattatatttgcagaaatctaacaattctgatacttatgaaaatactatctatccatgatttgcaaataatcaggaagagagcggagcaccatctttcattgcgcgaagaaagtaatgaaaaggtttccgaaaaatgttgcgggctggcgtccggaacagcacacctccagattcttatttgcggaggtaccggttgtaaagcctcttccagtcagggcatcactgaaaatcttcaaaaagccattgaaagaaacgggataaccgacaaagtagacgtcatcacagtaggctgcttcggcttctgcgaaaagggccccatcgtaaagatcatccctgacaatacgttctatacccaagtcactcccgaagatgcggaggaaatcatcagcgaacacatcattggaggacgaagaatcggacggctgctctacatagacccgaagaccgagcaaaccgtcagcgactccaaacacatggacttctaccggaaacaactccgcatcgccttgcgcaactgcggattcatcgactccgaaaatatagaagaatacatcgcccgtgaaggatacttcgcactggccgactgtcttctcaacaaacagcctgccgacgtcatcgacgtcatcaaacgctccggactacgggggcgtggcggtggtggtttccccaccggcttgaaatgggaatttgccagtaaacaggcatcggacgtaaagtacgttgtctgcaacgccgatgaaggcgaccccggcgccttcatggaccgctccattatggaaggcgatccgcactctattgtagaagcgatgtgcatctgcggttactccatcggttcctccaaaggactggtctacatccgcgccgaatatccgctggccatcaaccggctcaaaaaagcgattgagcaagcccgtgcatacggattactgggagaccacatcctggggacagatttcagcttcgacatagagatccgttacggagcaggcgcgttcgtctgcggcgaggaaaccgccctcatccactcgatggaaggaaaacggggagagccgaccctgaaacctcctttccccgccgaatccggttatctgggcaaaccgactaatgtgaacaatgtggaaaccctcgccaatattcccattatcctgaccaaaggcgccgaatggttcgcctccatcggaacggaacgctccaaaggaaccaaagtcttcgctcttgccggaaagatcaacaatgtcggactgatcgaagtaccgatgggaactaccctgcgggaagtaatctacgaaatcggcggaggcatcaagggaggaaagaaattcaaagccgtacagacaggcggtccgtcaggaggctgtctgacggagaaacatctggatactcccatcgacttcgacaacctgctggcagccggttccatgatgggatcgggaggcatgatcgtgatggacgaagatgactgtatggtatccgtcgcccgtttctatctcgactttaccgtcgaagaatcctgcggtaaatgtaccccatgccgtatcggcaacaagcgcctgctggaactgctgaacaagataacggaaggacggggcacggaaaaagacctggacacgcttgccaccctcggacgggtgataaaggatacggcactctgcggactgggacagacgtccccgaatccggtactgtctaccctcgacaacttccgtgacgaatatctggaacacgtcagagacaagacctgccgcgccaaacaatgcaagtccctgctgacctataccataaatccggaactttgtatcggttgccacttgtgtgccaagaattgtccggcggatgccatcagcggcttggtacgcaagcctcatgtcatcaaccccgagaaatgtatcaagtgcggcatgtgcatggcacgttgtaaattcaaagctattcttgtctgctaaaatctactgctatggaagaaaaacaaattaccctccagatagacggtcactttatcaccgtacccgaaggaagcacgatcctcgaagctgcctgcaaaatcggcatcaacatacctacgctgtgtcacatcgacctgaaaggaacctgcatcaagaacaatcccgcttcctgccgcatctgtgtagtcgaagtggcaggacgccgcaatctggctcccgcctgcgctacccgttgcacggaaggaatggtagtgaaaaccagtaccctgcgcgtgatgaacgcccggaaagtggtagccgagctgatcctttctgatcatcccaacgactgcctcacctgtcccaaatgcggcaactgtgaactccagacactggcactgcgcttcaacatccgtgaaatgccgttcaacggcggcgaactttctccccgcaaacgggaagtgacctcctctattgtgcgcaacatggacaagtgcatcttctgccgccgatgcgaaagtgtctgcaacgatgtacagacagtcggcgcactgggagccatccgccgcggattcaacacaacgatagcccctgctttcgacagaatgatgaaggacagcgaatgtacctactgcggtcaatgcgtagccgtatgtccggtaggcgcactgaccgaacgggattacaccaaccgccttctggacgatttggccgaccccgataagatcgtaattgtccagactgcccctgccgtacgtgccgccctgggagaagaattcggcttgcctcccggcacactggtaaccggaaaaatggtttacgccctccgcgaactgggtttcgactatgtattcgataccgactttgccgccgacctcaccatcatggaagaaggttccgaaatcctgaaccgactgacacgctatctggacggagataaatccgtccggcttccgattctgacttcctgctgtccggcttgggtaaacttcttcgaacaccacttcccggatatgctggatatcccttctaccgcccgttctccgcaacagatgttcggctccatcgccaagtcttactgggcagagaaaatgggaatcccccgcgaaaagctggtagtcgtctccatcatgccctgcctggccaagaaatatgaatgtgaccgcgacgagttcaaagtaaacggtgtccccgacgtcgattactccatctccacccgcgaactggcacgcctgataaagcgagccaacatcggctttaccctcgtgctggacagcccgttcgacaaccctatgggagaatcgaccggcgccggtgtcatcttcggtacgacgggtggtgtcatggaagccgccctgcgctccgtttatgaaatctacaccggacagccgctgaagaatgtcaactttgaacaggtacgcggactgagcggtgtccggcgcgccaccatcaacctgaacggatttgaactgaaagtaggcatcgcacacggactaggcaacgcaaggcacttactggaagatatacgaaacggacataatgaatatcatgtcatcgaaatcatggcatgccccggcggctgcatcggaggtggcgggcaaccgttgcatcacggcaactcggacgttctctacgcccgtgccaacgccctttaccgggaagatgccaacaaacctttgcgcaaatctcacgataacccgtatattcagaaactgtatgaagaatacctcggcaaaccgctgggtgagaaatcggaaatgctcttgcacacgcattatttcaacaaatcgattgattaactttaaacaagtactattatgtcagatatcaaactagcctgcgatgtggtggaacaagtcaagacgatttgcgacaaacacggaaacaatgcgggcgaattaatcaatattttgcatgaagcacaacatctgcacggctatctgcccgaagagatgcaacggatcatagcctccaagctcagaatccccgtgtcgaaagtctacggagttgtgacattctacaccttctttacgatgactcccaaaggaaagcatccgatttccgtctgcatgggcacggcgtgctacgtacgtggttcggagaagttgctggaagagttcaagcgggtactcggcatcgaagtcggagaaaccacccccgacggaaagtattcgctggattgccttcgctgcgtaggtgcctgcggactggctccggtagtaatgatcggcgaaaaagtatacggacgactgcaaccggtggatgtgaagaagattatcgaggaactggaataagtcttccccgcccttcaaaagaggatgtgacgtatcgggtatccgatatgtcacgcatcttctttggggtcgtatccccacttcacataaaccgctccccaggcaaaccccgcaccgaatgcggtaaatatcagattatcgcctttcttcagttttttctcaaaatcccagatgcagagcggaagcgtaccggcactggtattgccataacgttcgatgttgaccatcactttctcggacggtacttcgagccgttgcgccacagcggtaatgatacgctggttagcctgatgaggaatcacccagtcaacctcttccttagtcagatggtttctggcaataatagcttcacaggcatccgacatattcgctacggcatacttgaataccgtgcggccttcctgataaatataatgcagatgatgatccaatgaataataagaaggaggacatacggagcctcccgcttttatatgcaggaaaggcagccctttaccgtctgttctcaataccgagtccatgatgccgacctcttccgtagtcggttccagcataaaagcggccgcaccgtcgccgaagataggacaagtggcccggtccgtataatcgattacggacgacatcttatcagcaccgacaataataatctttttatattttcccgaacggataaaattcgctcccgtttccatcgcatacaggaaaccgctgcaaaccgcctgcatatcaaaagcgaaagcattcttcagtcccagtctttcacacaaaatagacgccgttgaaggaaaacgataatccgaagtagtggtggcaacaatgaccagatcgatatcatcgggatgactctttgtgcgttgcatcaactgcttggcggccttacgtgccatatacgaagttccaagcccctcctcattcaagatatgtcgttcttttatgccgatacgccccatgatccattcgtcggtggtatccaccattttagaaatttcatcattagtcaacacataatcgggcacatatcccccgaccccagtaattaccgcatttattttatccatcaagtctattttcagaattacaaatatgtgatatctcaaaaaacatcgggcgcaaatatacagaaaagagaatgatatacaagagaggattaccaaaaatacccggcagttttacctatgaaaagaacttttggctaaagaacaagaagttttgactaaatttcagataagtacataattgaaaaacgtttgataacagtcacgcaacggggggaagtacattcaataattttcagattccgcggagagagcgggattcgaacccgcgatacacttttggcgtatacacgctttccaggcgtgcctcttcaaccactcgagcacctctcctctcgaaactcaaaaattataaaaaaattcggaggcattgccctccataataacaaaaaagcagctaaacagctgcttttcagcggagagacaggttctatcacctaccatttcaaacaatatcacaagctcgtaatatcttgttaattaccaagttattacaaagtaaacagaaaataaaatatctcttaatatctttgcatatctcactttttgggtgtatttttgggtgtcaattttcaaacacacccaattatgaatatcaaaagaaacatcattttcgcactggaaagccggaagaaaaacggcgtgccaatcacagagaatgtacctatccgtatgcgtgtgatattcgcaagccagcgcatagagtttacaacgggctaccgcattgacacagccaaatgggatgcggacaaacaaagggtaaagaacggatgcacaaacaaactgaagcaaagcgcatccgaaatcaatgcagacctgctaagacagtacacggagatacagaacatcttcaaggagtttgaagtacagaacgtactccccacacccgtacagataaaggacagtttcaatgcaaggatgaaggatgcaccagccacagagcaggaaatagccgaagaacctaaaaccagcttttgggaggcgttcgaggagtttgtaagggaatgcggaaaacagaacgactggacagacgcaacctacgaaaaattcgctgcggtaaaaaaccacctgaaacagttcaggaatgaactttcctttgacacgttcaccgagaacggtctgaatgactatgtggacttcctgcgtaacaagaaggacatgcgcaacagcaccataggcaagcagatagccttcctgaaatggttcctacgctggagtttcaagaaagggtacaatcagaacatggcttatgacagcttcaaacccaagctgaaaaacacacccaagaaagtgatattcctcacatgggaggaactgaacagactgaaagactacaagatacccccgaccaagcaataccttgaacggataagggacgtctttctgttctgctgtttcagcgggctgcgctattcggacgtatacaacctcaaacggagtgacataaagccagaccatatagaagtgactactgtcaagacagcggacagccttatcatagagttgaacaaccacagcaaggcgatactggaaaaatacaaggacgtacactttgaagaccataaagcacttccggtcatcagcaatcagaagatgaacgattatttgaaagaactgggggagcttgcagaaatcaacgacccggtaagggaaacttactacaagggaaatgaacgcatagataccgtcacacccaaatacgccttgctgggaacccatgccggaagacggacattcatctgtaacgctttggcattgggcatccccgcacaagtggtgatgaaatggacgggacacagcgactacaaggcgatgaagccctacatagacatagccgacgacatcaaggctaatgcaatgaacaaattcaaccaactgtaaccgcaagaatatcatggaagaaagaataacctcaatgataccccgttacgggaaactcaacaaaatatacaccgaaataatgtccggcggcagtttctcttttgagaagcagcagttcatttccgatttttacagagagtacggagacacgcagccctttgaaaccgcacttatcagcctcatgcttgaaatggatgccgcgcacttctccatattgctgaacagcctgaaacgtgagattgaaagcaacatctcgacttacaacacctgcaaggagtttttcgaccgtctcgataccggatatgtctgccgacagcatgaaagccgttttgactggggtattgacagacagatgaaagtcacaaacggatattaccgggaactcatggaagcgaacggctctttggaggcggtaggtttcagggaacacgaccgtcaggaagaagaactgctggaaagaaggtacgaacggtgcaaacgggaatacgacaaggagaaaaccaagctggatgaactgtacaggcagaaggagcaggcaagacgggaagccctgcaatgcctgcaaaaccgttgcggggacatttgcaggctgggcggctcactattggcaatccttgaaaaatacctgaccgaccaaaagaaaaaggaaggggaagaaaaggaaatgtccgcatccggtaccactccggcaagcccgcccgcctatttccccatgcggctgctgtcagccatttatgagaaatgcaacggtgaacagttcgaagccgtttccgaactggacttctacgccggcatgaacctgcaaccatgcgaaggcagactgaaaacaagaccgagggagaaggcgcgcgtatgctatctcattttccttatgggtgaaacgctgcccaagccggacagagagaaatggaaagagggcatcatgaacctgttgggaatagaagatacatactacaagtcaaaatacaaagagcccgtttccgattttcccagtgacagcaatcaggaatttgccaaggaaatgcgctcaatattccgatagccggtgatatgtcccgacattccacgacacgaccacttttaccactcaaaataatttccaccacttttttattacttactgatatttaacaagatagcgtgataccccaatcacgctatccacatccttaccacccgtacccggaactaactttgcactgttcgaacgaggtaaaaagcccatgcgcagggcttgcagtacaaacgttaatttcattctgatatggaaattagagaccttttatcaaagcccgtatggcagatgacgggcgaagagttcatattcttgaaccggcacgccttgcagggaagcggaacgaagccagcccaaccggcagccgacaaggaaaagaagtatgtgtacgggataggcggcatagcccggctgttcgggtgcagcatacccacagcaaaccgcatcaagaaaagcgggaggataaacagagccattacgcagataggacgcaaaatcatcgtcgatgcggacatggcgctggaactggcaggacgcaaaagcgggggacgcggatagggaggtgtagtatggacaacaaggaaagaaacatcacccccgaagaggcggtaatcctatggcatgcctcgcggcttgacctctcgaaaaaccacgagcaggcgcccgaaatcctgaaagtgcagggctccgtcatcggcacactgggaaatttcagcgcgtcaatcggaaaagccaaaagcaagaagacgttcaacgtctccgcaatcgtggcggctgcgctgaaaaacgggacggtactgaactatacggcggaactgcccgaaaacaaacggaaaatactctatgtggacaccgagcagagcacctaccactgtgagatagtggcaaggcgcagccttcgcatggcgggactgccgaccgacagcaaccatgagaacctcgagttcctcgtcctgcggaagtacacgcccgaagagcgcatagcaatcgtgagggaggcaatttaccgtaccgagaatgttgggctggtagtcatcgacggaatacgggacatggtgtatgacatcaacagttccggcgagtccacgaaggtaatctccctgctgatgacatggacgggtgaaaggaatatccacattcacaccatactgcaccagaacaagggggacgagcatgcaagggggcacatcggaaccgaactcagcaacaaggcggaaacggtgctgcaagtagaaaaggacgagaagaaccccggtgtaagcacagtcaaaaccgcacatatcagggcagtggacttcgagccatttgcttttcgcatcaacggggaggcattgcccgaactgctggaggactaccagttcaaggacaaggacgagacaaaagggaatagagggaagttcgacccgtatagggacatcaccgaacagcagcaccgcatcgcactggaagcggcattcaccctgaaagacgaatacggctacaaggaacttgaaggggctttgcgggaagcatacgcctctgtcggtgtcagactcagtgatcacaggctgcgtgacctcatcaccgtattgaaaaacaagcggatgatagtgcaggagaacggaaggaaatacaccttcaagccggacttccactattagcggcgcagaccggaaaccgcttcacttcaaccggggtatatatatatggtgaagtgaagtggaatattccggaatatggtaaaaaccgcttcacttcattcccgtacctatatatacggaagtgaagtgaagcggatatatacagaccgtaccgcaaacatgtacgggcgaaaagaaaaaacaatatccacttaaacagaaatctacatgaatacgaatgaagcgaagcaaatacgcatagaggaatatctgcacactcttggctacaacccggtaagacggcagggagacagcctatggtacaagtcaccgttcagggacgagcaggaaccgtccttcaaggtgaacatggaacgcaacctatggtacgattttgatgcgcgggcaggggcgggaacatcatcgcactggcgcgggaactctacgcatccgacagcctgccctacctcttggaacggatagcggagcaggcacccggcgtgcgcccggtctccttctcttttggcgggcaaccactctcaaaaccgagcttccagcagttggaagtggtgccgctttcttcccccgccctattgtcctatctgcggcagagggggataaatacgaaactggcaaaaagagaatgcagggaggtgcgctatctgactggcggcaaaccctactttgccgttggttttctcaaccgttcgggaggctacgagatacgcaacaagttcttcaagggatgcatagcaccgaaggacatcacccacatacggcaggaacagccgaaggagacctgctacctcttcgagggcttcatggactacctctccttcctcaccctgcggctggaaagatgtcctgaccgtcccgaccttgacgggcaggactacatcgtactgaactcgacttccaacctctccaaggcaatccgaccattgggcggttacgggcgcattcactgtttcctcgacaacgacaaggcgggaatggaagctgttcaggaactgcgggaggaatacgggctgcgcgtccgggacgcatctcacatatacggaggctacaacgacctgaacgatttcctgcgggataaacagaacggacaatccgaacatcagcagcagaaaccggaaccggagaaaagccaacagaagacagagcaaccggagaggaaaggcaaaggtatcaggatgtaaccgtacagccaacggaaggctttgaaaaaagccatagctcattagggctttttcttcacgcaatgcacgcatcgctaaaaaagccccaatgagcaaaagggacgccgccccttttgaaaccccgcagccatgcggcatgggagcaaggcaggggaagtattaaccgaaaaaatgtattacagttatgggatatgcagttttgcatttggaaaaggcaaagggtgcggacggcgcaatgtccacacacatagagcgcaccgtccatccgaagaacgcggacagaaagcgcacgcacctgaaccgggaactggtgcagtttcccgaaggggtgaggaaccgcacgcaagcgatagcgcaccggatagagacggcgggcatcaaacgcaaggtgggcaccaaccaggtgaaggcaatccgggtgctgctcaccggaagcaacaaggacatgaaacaaatggaaacggacgggcgacttgacggctggtgcaacgacaacctgaaatggctccgggaaacatacggggagcggaacctcgtgtcggcagtcctgcacatggacgagaagacgccgcacatacacgccactatcgtaccgatagtgaccggagagcgcagaaaagccagaaaggaagaacagaacgggaaaaagaaataccgcaagaagaacacgcaggatgtacggctgtgtgctgatgacgtcatggcaaggcacaggctgaaacactatcaggacacctatgcacaagccatgagcaaatacggcttgcaaagaggaatagacggttcactggcaaaacacatctccaccatgcaatactacaaggaactggtagagcaacaagacagcctgcaggagaacatagaaaccctgctggggctggaagaggaagcgcagaagaaactgaaaaaggtcaagggagaaatcaacgtgcagaagatgaagggtgcggcggtgaacgccaccacagccatagcggacggggtgagttctcttttgggcggcagcaaggtcaagaggctggaagcggagaatgagagcttgaagcagaatatagccaatctgcaaagacaagtacaagccgaacagagggaacagacaaaaatggagcaccgccacaacagcgagataaacaagatagaccggaactaccagcaaaaaatcagggaatacgacaacagactggaacagatagacacctatttccctatcgtaatggaactgctgcccatagccgaacaatgccgggaagtggggttcaccgaggaactgacaaggcaaatcgtcaccctacaacccgtagagttcaagggaaggctctattcgaaagagcaccgggaaaagttcaggacagaccactcgacggcaaccgtagagagaaatccgcaggagaaaggaaagttccggctgtgcattgacggtatacccatactcgaatggtttaaaatgaagtttcaggaactcaaagaaaaactgggtgtaagccacacccaaaaagaagaggacacccccaaaaggggattcaggttataaaacacaagaaaatgagaaaattcaaatatatttagttggggttatttaattatttttcatatttttgcatcggattgagcaaaactctctccaaaacatattagaatttttagaagcgttatgcttatcgttcagtcggaaacctaggaaatttcccagacatacaaacgatgatagcatagtggttctcacgctatagcgtgggctgctattggtacatctgtttgtataggctttcctagggcctccgattgaagatgtgagcattgcagttccacgcttcagtgtttaataaaaggtctttaaggaactggaaagacttcatttttcatatatggaaaaagaatgtccaaactgcggcaaagagatgaacgttgacaaatacatcaacgaaacaacaataataacgtcttgcaaattttgtcacagaatattcaaaattacctatgatgaaaaaaaagttccaaacaatataaacgattttaattggggagcattctctttatggcatttatggggattttggaatggtatgcctatactatcttgttttggcattttactaggactaatcactaacaccttctatctattattcataatagacatagctatctcattgtacttaggcttacaaggcaataaactttcatggcagaaaaaagattggtcatcagcaacaaattttgaaatataccaaaaaagatggaatatagcagggattataattctttgcttatttgccattagtggttttttctatggaattctactaaataaatgacacatgaaaatagaagatattactccccaaaaagagaaaaaaaattactacgcaaaaaacaattggtttaattattggtttccattacccaaaggttataatagacttctcattgtttttgcttgtcttattattgtttataccgtacatgaatatcctgaaaaggttaacacttttttcttcactctgttagttgaagtcattacttatgtagctattatatggatttatcgtggatttaaagaattatcctaaaaatatgaaaagacataattataatattgcaatagctattgcaatcagctgtatcctttttcttattaacggttaccataattacataaaagaccaaagaaaagagaacctagaaaaatataaagctggatactatgataatgtaacggtcaaaaacaaaaatatagtacctaacacaacaaaaaactatgttccacccaagaactggactaaatacataatagccaatgctttttctattagcgtacctcctaccgttgaactaaggcaaagtaatgatttatacactaaagatattaaaaaacttagttggcatggacataaaataaatagcaataatgttgtttttcaacagaaagggctatctgttaatactcctgaagcacatcaaacatattgccgaattataatagatatccaaaaaggaagtctaggagaataccctaaattttcagattacgaagatttgactatagaagacatccatacatttcaagaactagcaaaacagaactcttatgaatataaaattttaggtcaaccagaagtgcgatggattaagattgaagatacttacggaatagaagttgaatatgtgcgaaatggagcaaataattcccgtactcacgtctgcaattattatttttttaatgacaatctatttgcaacaataatattatcatatagacaagacgatataagaaaatgggaaacagatttttcaaatataattaaaacatttaagtggaataataaaaaatgagttatggaaaaaattagttttatgcgaagattatcaagttctttaatagacaaagtcttaatccttgtattatttattattagtgctttatgtatatctccctatggaatgccttctcatttaggaagttattacgccctattagatgcagccccatcatcttatccctctcaggatacatataaagcaatgcatagtgtttatggcaatactatttatgaaagtacagaaaaatgggttcaatgtcataaagaaatattaaagaagcctgaattaatagctccacataaaggtgaaaccctatcttgggatttacaaataacggggctttttataattgtaaattttatatattatcttttatgggaatggatatttcgtgcatcactaggcaaatttctatgtggacttactgttgcttccgataataatcaaccaacaacagaaaaagaaattatcaaacgctgtttcttattactactcttaatgatagccgcagtaggtctaagatttactttcgacatcaattattacatgactattttattgtttttcctgattgtagacacatctgtaatcataaaagggaaatcgttaattgatattatgactagcacatatatcacaaaaagaaaaatctataaaaacgaaaatcttaaataaaacaaaacacccagttttacgttatagggtgtaaaactgggtgtaaatcttataaaccgctaattatcaaggtttattgcggagagacagggattcgaaccccgggtacctcgcagtacaacggttttcaagaccgccgcaatcgaccactctgccacctctccaaaacttccttatcagaagtgcttttcgttaaaagcggtgcaaaggtacaaagatattttaaacccgcaagagttttcactaaaaatttaatctaatcttttcctaaggatagcaattaataggtattttatgttgaaaagcataaaatagagcatatttatgccgattatatgaaaaatgattgtaactttgtgcgctctaaagaataggataactacaacctctaattttatcattttatggaattaaacaagatctttaaagacggtctttggagcagcgaaatcaacgtcagagatttcgtaagtcataacatcactccgtattacggagatgcttcattcctcgaaggacctacagaacgtaccaaagccgtatggaaccgctgcctcgaagcgttggcagaagaaagagaaaacaacggtgtccgctcattagataatgttaccgtatcaaccatcacttcccacaaggccggatatatcgacaaggaaaacgaactgatcgtcggcctgcagacagacgaacttctgagacgtgccatcaagcctttcggaggtatcaacgtagtcagcaaagcctgtcacgaaaacggtgtggaagtggacgaccgcgtaaaagatattttcactcactaccgcaagacgcacaacgacggagtattcgacgtgtatacggaagaaatccgttccttccgttcgctgggattcctcaccggacttcccgacaattatgcacgcggacgtatcatcggtgactaccgccgtatggctctttacggcatcgaccgtctgatcgaagcaaagaaggaagatttgcataacctcaccggtccgatgacagaggcccgtatccgtctgcgcgaagaagtggcagaacagatcaaggcactgaaagacatgaaagtgatgggcgaatactacggtctcgacctgagccgtcccgcttacacggcacaagaagccgtacagtgggtatatatggcttaccttgccgccgtcaaagaacaagacggtgccgccatgtcactgggtaacgtttcttctttcctcgatatctatctggaatatgaactgagcaaaggaaccatcaccgaatcgttcgcgcaagagctgatcgaccagtttgtcatcaaactgcgtatggtccgccacctgcgtatgcaatcatacaacgacatctttgcaggcgacccgacctgggtaaccgaatctctgggcggacgtctcaacgacggacgtaccaaagtgacaaagacctccttccgtttcctgcagacattgtacaacctcggcccttcaccggaaccgaacctgaccgtactctggagcccggaacttcccgaaggattcaaagaattctgtgcaaaggtttctatcgacacttcttctatccagtacgaaaacgacgacctgatgcgtgaagtacgtcagtccgacgactacggaatcgcctgctgcgtatcataccaggaaataggcaagcagattcagttcttcggtgcccgttgcaacctggccaaagccctgttgcttgccatcaacggcggacgttgcgagaataccggtacagtcatggtgaagaacatccccgtactgaccagtgacacgctgaagttcgaagaagtaatggacaactacaagaaagtgttgaccgaaatcgcccgcgtatacaacgaagcgatgaacatcatccactatatgcacgacaagtattactacgagaaagcccagatggctcttgtagatacgaacccgcgcataaaccttgcttacggtgttgccggactttccatcgcactcgactcactgtctgccatcaaatatgcgaaagtaactgcccgccgcaacgatatcggcctgacagaaggtttcgacatcgaaggagaattcccttgcttcggtaacgacaacgacaaggtagaccaccttggcgtagacctggtatacttcttcagcgaagaattgaagaaattgcctgtttacaagaatgcccgtcctaccctctccttgctgactatcacttccaatgtgatgtacggcaaaaagaccggtgctactcccgacggacgtgccaaaggtgttgccttcgctccgggtgccaacccgatgcacggacgcgacaagaatggtgcgatcgcttctctgagctctgtagcgaaacttcgttaccgtgactcacaggacggtatcagcaacaccttctctatcgttccgaaatcactgggtgctacggacgaagaccgtatcgagaacctcgtaacgatgatggacggttacttcaccaaaggtgcccaccacctgaacgtaaacgtactgaaccgtgatatgctatacgatgccatggagcatccggagaactatccgcagctgactatccgagtttccggttatgccgtaaacttcgtgaagctgagccgcgaacaccaactggaagttatcagccgtagcttccacgaacgtatgtaatctattactctatatgatgataaacgtacattcatacgaaagtatgggaacattcgacgggccgggcttacggctcgtcgtttttcttcaaggatgcaacttccgctgcctctattgcgccaatccggatacgatagcaggaaagggaggcacacctaccccaccggaagaaatcgtccgtatggcaatgagccagcgccctttcttcgggaaacgcggaggaatcactttctccggaggcgaaccgacgtttcaggcgaaagcactcgtcccgctggtccgcgaactgaaagaaaaaggcattcatgtctgtctggacagcaacggaggactttggaacgaagacgtagaagaattattcaagctgaccgaccttgtgttattggatataaaggaattcaaccccaaccgccatcagacgctgaccggaagaagcaatgaacagaccatccgtacggccgcctggctggaagaacagggaaaacctttctggctgcgttatgtgctagtgcccggatacagcgattttgaagaagatatacgagcactgggagaagcactcggaaaatacaagatgatccaacgggtggaaatactgccttaccatacactgggcgtacataagtacgaagcgatgggacaggaatacaagatgaaaggggtaaaagaaaatacccccgaacagcttgaaaaagctgcggaggtattcaaagagtatttcactacggtggtagttaattaatggagaattctccaatgacctcaaagcaagggcattctttaatccgttcccaaggatctacaatcccattatagttggtgtcgggacttaagtcccgatgacctactaccttagcttccggataacgctgcaacaattcgtgtaccaaacgatgtaacgcctccttctgacggggtgtacgcgtatccgccgcttttccattctcatccaaaccgccctcatagcatacacctaaactgatcgcattgtagccacgtgcatgagccccgaccgtatcttcatcccgcatcggctcaatctcgcccgacttgcgtatataataatgatagccccagcacgaaaagccacgataacggtgagccgtatccacatcctttgccgtaaagtcgcaatcgacacgggtggcggaacaatggatcacgatcagactaatctttctcatgttccttttccctttccgtcgttttcactttgcacacctccttacaagtagtatgatagcgcacttctctcaccaccttgtcccgctttctctttccgaagaaaggaatcagatacatgatcacatctaaaatccggtttactatttctttcattttatcaaaatattaatggaagttattctaattcgttattaccttgacccgtctgccaattataccgtagggtccggagcctcttcatcgccggagccatcaccgccggaaccggggttcttgtcagggtcttctcccccgtcatcgcccgcacccgcctgcgccaccgcacgagtcagcacttgctgataactcagaatcttcatcaactccgccagcgtcttaccggggcggaaaataagatgcgcccccttaatcatcgaaccggaaaactccttgaccgatgccgcaccttcactgttcagccctatctgcaaactgcccaaatcgcccagtctcgcaattcttcctgccttcaacgcacgcttcacttcgtaaagaatacccgaaatagccgcacgtacatccgtttccgtacaagtagaacgactggtgatcgcttcgcacaactcttcaaagtccaactcccccgacgcctgcgcctgtgcataatactttgccggttcgctcttttttgcaggattcttgcgcggcaccactgaataagatactgtcattgccataataaaataattttaaagtttataatacgtaggatgcatccctttcttgttaacagcacaaagataagggtatccggacaagccatattccccaacgaagtttcttgatttccaacgaataaaaacgaagtcaaacctttgaaaaacaataaattttatgtaactttatagcataaaacaagaagaaaacatcatgaattacaaagaagattctttccttatccgcacctataccaaagcggaactggctcacctttacaatccccatgtctgcctcaaagttgctttacaaatacttcgtcgttggattatttacaacctccctctcctgcacgaactcgaacaggaaggttaccgcgcacgcaaccgcctcctttcgccgaaacaagtggcaactatcatacactttttgggcgaaccgtagtaacttattgccattctatacaaagttcctttacacatttccgcaaagaagttcttttgcactgacaaaaaacaattaaaatcaaaatgaaacatttcaccatatttcaaggtttctactacgtaatagcagagacgaccgaagaagaaatagtgtccactatcagcagttttacctaccgggaaaaagtcgaagaaatacgccgcatctttgcagagcaaggagaaaaggctgccaatgagaagaaaaaagaattgccggcaatcgccttctccgccagctaccgagggaggcgtaccaaagtgaatctcgtcaaatatatgggacacatcgtgatagacatcgaccatctcagcaaagaagaattggcgcgcatcctccctgtcatcaagagatgcaattacacccgtatcgcttttatcagtcccaaagggatgggcgtgaaaatcatagtgcgtgcatgccatccggatgagacattgcccgaaacccttcaggaaatagaagacttccatcatgcagcttacaccagactcgtttctttttacaccgaactctgtcagatagaaatcgacacctccggccaggatgtggcacgcacttgtctgttctcttacgatccggagatttatttcaatccgaacgctgacgcttttcttgtagatcaacctcaggcatcctacaaggtttcaaatcgtaaaaatctcttcggcagtaaacaacagactcctccggacggcaccccgacgaatgaagacacagcgctcaacgcccattccgccaacgcttctctggtgctgactttaacctactatcacaacaagtccgaaaaatacatagcaggcaaccggaacaattatctgcaccatctctcatgtaccttcaatcgctacggcattccgcaggaggaagcatccgcctttatcaaaagccagtttacagactttccggcagacgagacagtctctttgatcaatagcgcctacgctcataccgacgaatttaatacctgtaagctgaatggcacgcagaaacgaatattacggatagagcaatatatcagcgagcactacgaaacacgctacaacgaagtgctgcatatcatggaatatcgcagaaggcgtcccgacaccgagaaaccggagcctttccgcatcttggatgagatgatggaaaacagtatctggatagaaatcaacgagctgggatatccctgcactgtcaaaacaatcgaaaatctgatttactccgatttcagccagtcgtatcatcccattcgcgagtatttcgaattactgcccgaatgggacggaaccgactatatccgtatcctggcggatagtgtccagacgaatcatcaggagttctgggcggaatgcctggaacgttatctggtggcgatgtgtgcagcggctactcaggagaatattgtcaatcacacggtacttctgctatgcagcgagatacagaacataggaaagactacctttatcaataatctcctgcctcccgaactgcgtgcttatctttctaccggactaatcaattcgaacaataaagatgatttagccaaaataacgcaggccatgctgatcaatctcgacgagtttgaagggatgagcggtcgggaactgaatgcattcaaagatttggtaacgcgcaaagtgatcagtttccgtctgccttatgcacgccgttcgcaaaacttccctcatacggcctcttttgcaggaacctgcaactatcaggaagtgcttcacgacacgacaggcaaccggcgtttcctttgttttcatccttattccatccaatttattaccatcaattatgcgcagctctatgctcagatcaaatatctgctgaataagccggggtaccaatactggttcacgcaagcggacaatgaacggcttgaagagaataacgaggctttcatctttcattcaccggaagaggaaatggttcttacgcatatccgcaagccggaacgtttcgagaaggtttattatctgactgtcagtgagattgcggaactaatacgtgagcgtaccggttatcagtattccatcggatcaaaaatacagttggggaaagtgatggccaagcaccattttgaatccaaaaaaggaaataacgggcgccgatatgccgtatttattatagatatcgagcaggtaaaatcaaacaggctgtatgaatagaagcgggaaagccctgtgaatatagataaatgcagagtcatcttgacagatactctgcatttattgtttttacaaaatcattgaaaattcgattttacagcctaacgcattcattatacgatagaaagtagatactttaggctctgtctgaccactttctactcttgaaatataagaacggtcagaaccgatacgccgggctaattcagcctgagtgattttagccttttttcttgcgtcctcgataatctgccctgtataaaaggcgtaggccttttcttctgcctctgcacgagaagctgttccttccttaccaaaacgctcatctattaatgcactgacattaaagaattcctcatttgtttttgcttccataatactcctttcttaatatctttgctttatcaatttctttctttggtgttttttcggttttcttttgaaaaccgttaaacagaatcacaatacgcccttcgtcgaaacaaaagaatattctatatatattgctttggtactcgatacgaagttcataaagtccttcttctatcaaccgcataaatttcaaaggtattctgtcttgtgtctgcaataacattagcacatacaatatcttatcttgggtgccagcatctaaattttcaaagaattctttgaagtatcctttatatgctattatttctcttttcataacgcaaatataagaaatgttgttcaactatacaacacatttcctcgttttatattatttttcatcatcttcacccacaaaagtgagaggagtgagagaggaattgaaactttttctattttatttctttatttctactttctatatttctctaaaaaaaatacgaatgttagaattcctctctcactcctctcactttttaccttttctttctgcaaaaagacggcgggaaatcggaaaaacacaaccgtcttttttctatttctcaccgcattttcaaatcagcccaccaattgaagcagacttcaggaaatatttgttatctttgatgtgcaaaagatcaaaagaatcagatatggacaacttgatgcgtaaacttcctattggaatacaaacctttgaagatatacgaaggaagaatatcttattgtaaagatcggagtggaatttagtgcagaaagccggaacttaaatcgttggttaatcgaagtgataggaaagtaaaatatgaaaaaccgaaggattaagatatccttcggttttttcgactatatacccatgattggttttacgatttcaatcttcaatcctaatgcattaataattcggtagaatgttcctacacttggatttatagctccgctttcaatacgtgagatatacgatttagttgcattgattctctttgctaattcagactgagttacttttgcttcccgtcgtgcatccaacagtatttgaccagtataaaaagcgtatgcctcttcatcgaacttttcacgttccggagtcccaggtgctccgaactccttatcaagttctgcgctgatatcagtcagcatgttgttttttgtactcataatattcctcctttatttttaatgccttatctatttctgatgatggggttttctgtgttttcttatggaagccattaaataaaacaactatttgcccttcatcaaaaatgaaaaagatacggtaaatgtttccgttatatgatatacgtagttcatatagaccatcacgtataacctttataaatttgataggcaaacggtcttctgttccaagcaatgaaagcacatatttcactttttgaatttccttttctgtcagagtggcaagaaaatccttgtagtattgaccgtatgctattacttttcttctcattgtgcaaatataataaaagtttcaatatcatacaacttttaaagtcgaatttatactgctaacgggcttaaattccctctcaggtactcattttattcgaatttcccttccgaataatctgaaaactccccggcacgttctttcttctcatacgagaccaacgtttcgatactgagcgctttcccgttcttagggcttatgacatctatcacacttgacaaggaccggaacgtctgttcgcaattcgcatctccattatacgtcaacctcccccggtcaatggcacctagaataacagaaacataccgtttcggatctccccgatattcgataacagtgggcgtcatttgttcttcttcccgaatcagttggacgacaattctttttttggtcaatcagctccaacagttttttactatgcacactgatttgtgcatctacttcacgaagttcattcttcaatgaacaaaacaattcatcactcaatgaattttccataaaaacgatttttattaattataaaaaagccattccggaaagcacagctattgcctgcttcccgaaatggtgactaataccttcaaaaacactacgctgtattgtcctcaacagaacaatacgatatttaaaatctaaggttagttatctttttgttctttcaaccatctttccactttttctaccatcggcatttcatacagaaatatccagtcactgttgttacttaaagcagacaaatgatgatggtgattctggtcggcaatatacccctccggactctccataaaacgagtttgcgaataagtcttttcaaattcagcacgcatacttttgaaggagttacaaacgtcacctatccttactaatgcttgaagacgttcttcatcgttttttgtactgtcataaacctctaaaacttccaacaatttcaccggatagtgaaacagttcgttcgtctgcttataaatatccaacgtgtagcgattgcgtaaagctgcctgttcagccactttcaagcctttacaaatcttctcataacgcgccgattcaatgcggacggtatccagtcttccctgatatttccgcttccattctcccggtttctccgaatccggcaaatccagcaaccggaatgtttccgatactccccaagcaggatttcgcgtgccggaaacgactaatgcctgatcaaagaagaaagcagctttctccatttctgtcagaaactccatttgctgaccggacaagccgaactcccttcgggcgtgcgcccggataaactcatccacagtccgcccgtccggatgccaactatattcgccctgtgctataagtccgcgcatcaccgtttcccaatgggcagaggcatcatcccaagccgtggcaaggatgcccttcaactgattttgagaaacaagtttgcagaaatctttaatatattgtgccctagagttgtttctgggcataaacggggtttcaccggtcgctgctgcggtagctcccattacattcagtccattcttatgataccatttcaggagcatctgatgggacaagacggtagggtcttcgtaatgccaacgcatatagatgcaattcttcgggaacatcttgatagcttcgtccagccgggaggtattccagttcttacgaatttcatcatcggtgagcgggcgatgcaacaaccaccaaaggtcggcatacttcaaaggcatatcatcccagaagatgggagttctgccatgttccacagcaaagtcgcaaacctttttgagccagatcatctgcaattcaaaagctgtttttccggtcgctttacaacgttcgtctatgccgatagccgttatttcatctccaccgatatgaagatacttgccatcaggcatggcttccatcgcatcccggtaaagatcaaactgtaactcataggtacgcgggtcggaaggacagaactcccagtcactatacggattttcccgcagttcccaatggcgtttcaggataaagccggcgtgtcccaatccttgtactaagggactgatttcaatattacgttctttggcatagcgactgatagcctgcatctcttgtttgctgatggcgttgggggcgcccacttcgggacggcgggtatagcgcagcttgtcttccacttcccaaatgatggcattcaccttatagcgggccagtttatcaatggtccgatagtagtattccgtccggtccagatgatgcttcgtatcaaagtgaacggcacggtaagagatttcgggataatccgtcattcggagacatggaatagggatacgaaggtcacgactatcctccatcagttgttccaaggtctgacaaccgtagaacaatcctgcttgtccacgcgattggatcgttactccccgggatgtgatttccagcgtatatccttccggagattcgggtgtgttctgttccgacagggaaagtgtaatacctgctccttgtttttcaatgcggggtaaagcgtccagcaatgttcctaaaacggggattttactttcgcctttcgatacgatatatcccagttcactacctgctatcccctgccctttcaatatctctatgttctggggtaaagggagtatctgaaaacgtgggtccagtccctttgcctgcgacatggcggagacaagtataaacagcagtacgaaagctattttattctttaatttcttcattatctatttctgtttaatcatttgcagatagttctttcaatgttccttcggctattcctacccacttggcggcttcacgccccgaagcagaggtgaaattgcggatagctgcgtccagttgtccgttgttcagtatacgtgccttttcataatcctgaatgccttcccgcagcagttccagacggatgctggagatgggaacagcggcggcggtattttcgctgcgataaatcatattgaagtcgccggacgcattacttccatcctgtgcactggtagggtcagactgtgtccagtaatcgtatgcccagcgcagatatccgtcaaatccttttgccagcgcataccacgccatccacgacatttctgccggattggtttgcgccgtaacgtagttgttcgggtattgctgcgagcaactggtgtagaaggtagaaacggcattgtccgactggcgctcgtagcctaaaatggtcgaataatcatacaggctgttctctatcccgctatcgacatttcctcccgacagtcctattttccagttcgcatcgttctctttgattaaagctatgattgacttcataccgtcttctttaatctcatccatataaagcacggttttgtcaaaccagcctttttcttgcagatgcgtcttgaaagaagtcaggaaagcagcccacactgtgttgtattcttccgtaccgatggtgagttccaatgtccggtccgtgcccgacgcatctttatatccgacagacgtcttccatccggccaaagaaaaacagctgatctgtttattgattccccattccatcattttcccgacatatttatcaaaatcggtatagtcgaatatccactcgtcggaactgtttttcgaccacttcaccatcgtttgtccgctattgaaagcaccgtccttgatatacgtggtgattaccttctgcccggcatctgccaacagttgataaaacggcttcatcatcgcaaaatattcgtcggagaaaggaacgacattttctccgttgtcccgacacagagttgtcaattggaaagggaactgccataaatcaagatggaaactccaatcggctaccgcaggcaactgatgatctacgacaagcaattccagattaaacttctgcttcacttcattggctgatttcacctgaatggttccggtatatatgcccggtacggcatctgccggcgtgtttatggtcacccatatcttaacgggatcttgagtggtgagcgttgtgacgggtacttcggaaagggcatcggcaatcaaggtagtggtgcggctctcataatttccacaatcgagtgcctgatcgtctccctttatataagaagggaaacgaagtcggatattggaggcagagatgctgttcgcgtcgctcaccagatccgaaacttcataagtgaggtcgtcatattttttatctcctgaccataacactatctgtttgtgtgtacggtcgttctgccaaagggtgtctttccaaagggtgacgatcttcgctttttccatctgagcttcgtgttgttgacctttggagtatctcacaaacttactttcgaacgaaccccgcagggtagtaacggcaggatctacgggaacgacaggttcttcccagttgtcggttggcaacccctcggtacaggctattactccataagccagtgaaaacaaaaatatactgcttaataagaatttcttcataattgttgatttatctcgttatagtataatcataaaaaggtgtactcaagtctaattctatccggtacataccagcttcgtcaatagtaatatccgtccctgtctccgacagtctgacaataccatcggacgccccatacgttacagtcggatcaccggcagagaccggaatagtggtaaatttcaattttccggctgtaagttctgtcgtcaaagaccacttgcgggcgtcagaattgtagaccattgctttcaccgttcctacggctgtccccgtaacagcccattgtgtctccagtaaaacgatctgacgggtagtgaggtcaaaattaactttccagatgcccggagagacaattgaaacattgcctccagtagttgtccaatctccccagggaccgtcacacggataatagccggttcccggagaggatttctccaccatcgctaaagttccataagattgtccgccgcccaatccggcgctaacatcaaaataggcggactggtcggattgcaccaagccgatgttgttccagctcgtatttgtcaagtctatatatccttcaaacagattattataggtaatggaagcaatggtctgtgccgtttctgtattcaggccatagtaatctcctttctcacccgacattaccaaatacattaccggaggaggattataactcatctccagtagaaaagtctcagcttgtgtccccttcgtccattccaatgcaaattggttattcctgaaagtaatcacatctcccacatttatattgaccgtagccgaagggtcggaaacgtctatctgtttcactatggcagtagtggaaggctgattgactgccaccaacaatgttttactcaacaaaccatcctcctgcaacagaggggtagccacatagtccgttccgttcacttccaagactaatcccgaaataggcgaaacaagggtaggattctccggataagaatcttcactgcaagaaacgactcctatcgccagacacaaagtgattaaaatcaaagttatatttcttttcatatcattctttcttttcgattatgttattgacgtttaattgtatccggggttctgaacaataccggtcatgatagtcatctggtcgctcggtttcggtagaagataattgtgatcgtcaatctttgcctccggataataagcttccaaagtctccttcagaatatgacgacggcacaaatcgaaccaacgattacattcaaaagccaattcccagttacgttcgtccaataccgccttgtcaaactgtgccggagtcagtcccgatagtttagtcagtcctgctcgttcgcggacttcattgatagcatcgtatgctgcttttgaagggctgccctctgccagattagcggcttccgcgtagatcagcaacacatcggcatagcgtaacatacagaaaaatccgtccgctttattagctgtagctatccctgaatatcctccgctctttggacctgcatcccggtactttcccacataaggttgtgccacattggtctcttcccacgaagcaccgtccctcatccgagtataaaaagttccgctcaaacggctgccatctcctacgggaaaagtttccagaaagcgtttgtcactggtccaatctgcccagccgttttctccgtgatcagtaggacgcacggcctgatggatataactgcctgttgcattgtccgaactggcataaagcgcaaagataaattcggagtttattttacggttgctccataaccacaattgggaatatactttttctaaggtatagaccttttcactaattacttcatttgccttatcacgtgccagcgcataacaggaagtctcattcaacggaaatcccgccattgtcaaatagacttttgcaagcaacgcttttgccgcccaacggctgggacggctcggatcatcctgtgaaagaggcaatgtcaactctgcattcttcaaatcagaaactatctgctcgtaaatccgggcaacactcgcctgaggctcttttgccgcattatcctgattttcctccgtcaacaatggcacttcgccaaaccaacgcaccaactggaagtaattaaaagcacgcaagaaatgggcttcccctccaatcggggacaattcgtcgggagataatttcgtgttctcaccgataatctttatcaatgtattgcacgcgctaatacttgtgtaatatgagttccataactcatccgtcacttcgtccggatttcctactgtgttaatgttaacctgttcgaatcctttccatctgatgacgggggtatttacatcttcggcacctgcactggccgcatagggcatatcggtaccatataaaaggattaagggggtataggctcctgtgatataactattgaagtcggtcagtgtctggaagaacttatcgacagttggctgtccggtaagattctctgtcaaatcggcacaactcgtacttaatattatcgccaataatccgacgcagctcttttttataagtgtacaattcatagtctgttattattaaatgatcattaaaacgaaatatccaaccctacaaggaaactctttgacgaaggatacacaccacggtccacgcctgccgcatccgagtctgctcccatacttgcttccggatcaaatcccgaataattggttattgtccatagattattggcactgacatagatacgggcggacgaacatcctatttttgacagtatcttgtgcggaatacgatagcccaatgtgatatttttcaagcgcaaatagtctcccttctccacccaacgggaagaattaacatactctgctcccgaaaaagcaggaatatttgtcggattttccggtgtccaatgatttttcataaccgtactggtcgggaatgcatctgacgaataagtctcacgccggatacgattctgattataaatgtcattaccggatactccctgccagaaaatattcaggtcgaaatcaaaaatcgtaaatgtattgttgaatccgaagctcaacttcggctgggcattaccgataatgcctatatcatccttatctatttttccatcacggttgatatctacatatttggcatctccgggctttgctccgtaaagcgcagccgtcgaaacttctgatttctgccaaacaccggcaaaggtatatccgaggaatgtgcccatcggttgtcccaccatctggacataagaacccaccaatcccggataatcggcaccggttgtaataagcgtattggagagcccgtccagttcgagaatcttatttttattgatattcaatgtataatttatgtcccatttaaaatgtttggtagagacaggaatgccacccaacatgatatcaaatcctttattggacacggaaccgacattggtaaggatggaactgacacccaataccgaaggcactttctgccacatcaacaggtctgtggttttcttgttataatattcggctgagaaactcaaacgccctccccaccatcgactgtctataccgatgttcaactcacgggtacgttcccatttcagattttcattgcctaaatctgatatggccaaagtcgggtttccgctatcgtccatgcccggataaaactttaaatgagaagagtaagcgggcactgccgcattgcctaccgtaccgtaacttccacgaattttaaactccggtaccatatctttcagccttttcataaatttctcttccataagattccatcctaacgaaaatgctgtaaaattgtcgtatttgtttccttctgccaactggctggctccgtcataacgaatcgatccggaaaacatatatttattcttataactataattcacgcgacccataaaagactgcatcaccgtagtagaatattccacccaaggggcctgcaaaatagaaccgaactgcactccattatatcccattcccaccgggattcctctggaagaagcagatgtgctctgataattatccttcaacacttcgtataccccggtagcctgaacggtatgatcaccaaaagccttatcaaaagtcagaatactggtactttgcaaagcaatatagcgtgattgggctttacttccgttaatatctctaatatcgccattattgacacgctgattatcaaaatacccattggtatcgctatgagtcttatatgaaaacaaagaagataatttgaggaaatcccagaatttatattctcccattaaagaagcattaaaagaagcaacggatttatcgtccactatctccaaagcataccccaccggattgtataatgaaaccggtcctattcctccacccggctgtgtatatcctccttcactatcgggatcatagatgcgtttcgtaggcgaccattgaagtgctgcattgatagcctgttcataatctccattgtgcgtctcgtcataagaggcaaacgtattcagcgacaaattcaaacgggatgtagcctgaactttaaagtttgcacgaaaagtatattgtttaaaattggtattctgcacaatgccatctttattggtatatcctccagctatgaaataagaaatgctttctttcgctccactgatactgatgttatgtgattgggaaaccgcattccgaaaaatcttatcctgccagtccgtactgtttccttccaacggaatctcatccggtccaaaaacaggattgagcccattctcttcctgagcctcattcatcagcagggcatattcttttgcattcaatgcaggcaaggttttccgtacttcatcaaatgaaacaaaaccgttgtaagagacctgcggctttccggttttcccatttttagttgtcaccagaataacaccgttcgcacctttcgaaccatagacagaaagggctgcggcatctttcaatacttctatggattctatctgattaggattcaagctcccgatattcccatcttgaacaccatcgattatgatcaaaggatcatttccataagtcagcgagttggctccacggatgcggatcgttgccgatcctgaaggagcaccactggaattctgcacaacaacacctgccacacgtccttgcaatgcctgcgcagtactggcattaggagctgacaatagctctgctgactttacggaagaaacggaaccggtgatatcacttttcttttgtacaccataccccacgacaactacttcatccaatactttagtgtcttccttcaggacaatccgaagcagattcttactatcggcagctcgaagttccacactctgataaccgatataggagactgaaatccaggcatcttccgatacctcatttatagtgtagtttccgtcaaggtccgtaattattccggttgaagttcctttcactaccacgctggccccaatgatcggttcgcccttatcatccacgacggttcctttgatgttcttctttgtactgccgtcatgaggtttctgcgtctttttcaagatgactatcatcttgttttgcaacttataagtcaaatccttatccaagactttattcagcacctcatccaatgatgcatttttgaaagttgccgtaattcttttattctcattcacttcatctgtcttatagatgacagataaacctgtttgttgctcaacttctttcaatactgtcttcaatgtttcattcttgaatgtcttgttgatgacctgggcgtgcaaagtcactgtcgccagacagaatgaaactaaaagaagcagccgtaataagctctttcggttgttcatagtttttctcgatttaatttaataatagttgttacgaaatggaaattattctctgatatatatatccttgcctttacgttcgacggttatcgggataatctcttgcaaagccgtcatcacctctccgattgtttctctgttacgcagagaaatacggaatgtcttgtctcctacagcttccgattccagccgaatattcacatcatattgtcgggatagttttgcaaccagttccttcaatgtaatgtgatcaaattctatacggttctccgcccacgcttttgattgtgaagcgtttacttgggtacggatgaattttcctgtttctacgttcaatctcatggactctccaggagacatccttatctgactgcctttataattcagttcgaccgaaccttcgagtaaagtggtggaaatgaacggatcgtcatcataggcggatacgtcgaactttgttcctttcacaacgacgtcatatccatgtgtctgcacgatgaaagtagctcccgctttcttggtgacttcaaaatatccttcaccgttcagttcgactctgcgattggcggtattaaacttgttcgaatacttcagtgtagaacctgcattaagccaaacgactgtaccgtcagacagaacgactttactcttctcgccataaggagtttcgcatacaaagtacgtttccggttgcaatgaggaagagagttgccggacaccgagggttcctcctatagtcagaagtacgatggctgcgacagcagccactttccgccagacggaaaatctcgttttcgaaatacccagcatcgggataatggcttcctgcgtgcggattttgcgttgtaatgtctcccactccttcgtggtattggaatcggtaatgcccgaggcaatccactccttttcccactgtctgaatgccgtgcgatttgcttcactttgtccgacatactcaaacaatagtttttcgtcttttcgccggattcttccttcgaaatactgaacggccaactcacgaatgtttttcttttcttccataatttcactttctataagatgtaacaactattatttcttttacccaaccacccatacaaagaaaaaagcaggaatttttcagtccctgctcttccaatctaattatcaatggtttatattttcttcttttatttattattcataatcacccaggcaacaatcataatataaatgtctaccggatacttgtctttgaagtgtttggagaagcttttcaatgctttcgcaatgtgcttctcgactgccgtagtcgatatctgaagtttgtctgcaatttcacgattcttcagtcctttgaaacggctcatcagaaagatttcccgcgaacgctcgggcagctgcccgatgacaaggttgatttgttcctgcaattcgtcatatagtagtttgtgctctgcatctagcgtgaagtcggcataatagagcctttcttcaccatcaatggatgcaagatattctatctgatgtttctcgacaatggaaagatgcttcaagtaattcaggcatccattgcgtaccattgcaaaaagtaaggaggtgaccgatacagccgacaacaactcccgcttctcccaaaaacgcagaaaacactcctgaataatatcacgagccgtctcttcatcttccacgaaacgaatagcatagccgcgcaaacggggataataagccttaaaaagatattcaaacgcctgattattaccttttctgatctcgtctaataagaacttttcatctgaaaaatcaaccatagtgtcgtattttgaaacaaaggtataaagttacagatgacaatgatattaatattttctcagatttccgatttttcagcaaagtttctgcatataaaactttaaaagcgatattttaaccgttattggtaaaatatcgcttttaaaatatatagctcaactatattgactaataagtaagtcggatacccgcctgaatattgaagttgaacggattctccttacggatggtctgtacatcggaaccgtcatcaaagaaataagcaacaccgggttctacgtatatacctacccgtttggtggcattaaactgtgcgccgactgcaccggagacggagaattgcaaaggtttcacagtttccttctctgtgcccagcttgccataaacacatttctcaatcatacctccaccggatacataaagagtaaacagtttcttatcaaggaagttccagttcgcttttaacgggatacccagataatgcagtttctgcttggtcttctggtcgctgtccgcaaactttgcatccgaagaaagcaaggtgtaagtcaatcctgtttcgacagagaaccctttcgccagactcttgcggacagataatccgaaggagataggttgatggtgttccatatcgaccacctgattggcctgacgcaaataaggtactccatcttcaaagaccaattgctgatcattgggtatgctcagcagaccgtttgataccgataccatgctcacacgggacatataagaaggaatgcccgatcccaactctgtagaagcaccaccggagttacctaccgaaagtcccatcgaccatgtgcctttctgtgaagatgccttttctgccggaatatgcagtttgtctctgctggaaggacggcgcggcttatttctcggttgttccgtatctgcgggcttatgctgggcggccttcgtttcttccaccggttccacttcttctttttctttccggtcgccggtctgagcgttcagttccgaaggttgctgctcttctttcttcaccggttcgtcgatatttgccgtcggctggggaatgttccgttctgctttcgcgatgcggttcttcactaccggacgcactaccggttctaccgttgttcctgtcatatccggttgctgcgcatccggcaaaacatccggtacagaggctaacgccggagtcttggcatgacgaatttcatcagcagcaggagtcccgaggaaatacaggctgaccgatgacaccaaagccaataaaatgacagccgcagcggctaccgtccatttacgataaggatatatcttcctctccacaggaggcataagttctttttccagttgttcccaaccggaagcaggaagcggctccgagtaatccccgagcttctccttcaacttattcatccataattctttctcttccatatctctacctatccgttattcattatccattcttttactctcttagccaacacgctcttcgcccgaaataattgcgaagccgatgacttctcattaatacctaacaactgtgctatttccttatgcgatttctcctcgaaggtgtaaaggttgaacacggtacggtatcctgccggcaactcttcgataaatcgcatcaataccgcttgcggaatcatctctacagccgaagcgtcgggttcctcgtaatcttcgggtacttcttccaaaggcgtagactgactgattacatcactcttccgaagatactgtaaagcggtattgaccatcacccgttccatccaggcccgaagtgagccttcaccccgccaggtgaacttgtcgaaagaactgaatatctttataaaaccatcgtgaagcagatcctgagctgtatcacggtcgccggtatagcgcagacagacgcctagcaaacgccctccataatgctcatacaattctttgcgggctcgattatttcccagcctgcattgttccgacaactcaaattcttccatttgcttatacacgtgtttaccttataaatgcagcaaagatagaaatactgcacagagagaacaactcttttgcaacttttgtttctttaacagatccaaatgcaatattttctccccccttgcattttcagagtacaaagcaagtaaatagtactcattaaaaaacatttttatagtatatgaagaaatttaaattcattgcatttattattgctgttatgaccacaatgccgatacttcagtcgtgtctggatgatgatgactcctcatccgattcactggtcatcagcaccatcaatctgatcagcccggatagcaaggatttctatttcactctggatgatggaaaaacaatgttcccgagcaatggaaacggatggatcagtgacaagaataaagacgggcaacgcgcctttgtgatattcaaagagctggaagaaccggtgaagggatatgactataatattcaggtaagagaaataaaagagatcctgaccaaagaaatcgtgactatgggggaaggagaaaatacggaagagaagatcggagacgataaaatcaattctacttatatgtggattacccaagacaagaaatatctgacaatcgaattccaatattacggcacgcatagcgaggacaagaaacatttcctgaatctggtcatcaacaacaaggaagctgaacccgctgccgataatgccaacgatgagtatatcaatcttgaattccggcataacgacgaaggcgacaccgccgaccgtctgggcgaagggtatatatctttcaaattggataagattcaagatcagatgaaaggcaagaaaggacttagaatacgtgtcaataccttatataacagggaaaaattctatgaagtggaattcccctcatctaattaaatctagtaattatagaaacactctttttattataatatataattacgcaaaagagggcgacagttgtgaaactctcgcccttaattttatcataaagtgatccgtttatttcttctcattcttattatttcttttcattcttgtcaccgaaataattccagacgagcgcactgacagccgctcctacaaacggcgccacaataaacagccataactgcgacaacgcttctccaccctggaacaatgccggaccgatgctacgtgccggattgacggaagtacctgtaatagggatacatacgatatgcaccaatactagagaaagaccgatggcaaggcctgcgaaagctcccgctcctttcttcggatcggtagaccccagcactaccaatacaaaaatgaaagtaaagaccacttctgcgatgaatgcctgtagcatctcgccgtcaccaaagccgttggaaccggtagctgtcggtccgtcgtgcccgccggtggtcaccagggcataaagaatagccgaaccgataatcgctcctataacctggaaaagcatatacatacccgcatcttttccattcatacgacccgaaaggaatactcctaacgtaatagcaggattgatgtgacatcccgaaatacctccgatagcatacgccatcgccactactgaaagcccaaatgccaaagcaacgccgaccgttcccacgccggctcctacagtaccagccatactgccggcaaaaactgcacttccacatcccatcaggacgagcaccatcgtcccgatcatttctgcaatgtattttttcatattactaaataaaaaatggttgattttccaaatataaggaattaatacctagattcaaaatgtatgtgcctaattattactatctttgcagcatttttgaataaaaccaccaaaccataaaatgaaaaaaggacttttttacgctatattggcctctgtattatgggctatcgtcaacccgtttatcaagcagggactgagttacgacttttcgccgatgaactttgcaggaatccgctttaccactgtaggcatcattctttttgcttatacctggcataaggggatgtggaaagaaatacgccaacacagcaaactgtttctgaatttgatcctgatcaatatgtttatggggtacaccgctttctatttcggagtcgatttcgtcagcggggctatctcttctatcattatgggaatgacacctctgatcaatgtactgctagcccatctgctggccagcaatgaccggctgaatgtgcacaagattatcagccttattgtcagcctcatcggtttgctgcttatcgtaggcatgggtagcaatggcgctccgctggactggaaagggatcacgggaattgtacttttgctgctcagtatcatctttcagggatattccgcgatttcggtatcagaagataaaggcaagataaaccctattttcctgaatgccgtgcagatgttcttcggcggactgctcatctatatgataggattaggtacggaagggtatcattcatttatcggaaagcctgccggattctatatcagtctttctattctggtatttatctcggtctttgctttcagtttctggtttatcgccttacagagtaaaggagccaaagtgagtgatatcaatatgtgcagactgatcaacccgatattgggcgccatacttagctggatcatgctcccgggagagtatccgacattcagtaccgttgcaggaatgattatcatagtcagctccctcattatctattttaagggagctgaaatagggcgatggttgaaacgccatacagccggaagcagtacgcaggaataagcaatattacagcaagtactgaatggattgcagggattgcatttctttgggtactgctgccagtatctcttctttgagtacattgagcaggctatgacggataaaatccctgctggtcgcaagcactatctgccgtgtaggacggggaatggcaaacggacgtaccagtttcttttgttcttcgttcagttgcgaaacagccagttcgggaatgaaggtgattccttttccgctttctaccatacgcataaaggtttccatacttcccagatggtaggccatctgattgactttgaccgtttccatctggcagaaacgtacaagctggtcacggaagcaatgcccttcgtccaatagccagagacgttcgcccgttatatcggaagtgcgtatcacgtcgtgcttgaacagaggttctttgcaggatacatatccgaagaatgtttcatagaaaagtgtttcttctttcaggaaagtgtcttccaatttgctggctataattgcggcatcaatatctccggcatgcaatgcctgctggatattctgtgttttcatttctgtgacacgtatatccagttccggatacttttccatcagttgggggaagaagcggggaagtaaataaggtgctatggtaggcaatacccccaaatggaacacgcctgccagtgactgtttctcttcactgattatttctttcacctgcgctgtctgtgccagaatgacacgtgcctgatcaatgatcttttctccaatcgctgtgggacagaccggctgcaccgtacggtcaaacaacttcactcccagctcatcttccagtttctggatcatagcactcagcgtgggctgcgtcacgcggcaatattccgccgctctggcaaaatgacggaactggtcaaccgccaatatatattctaattgttgtatcgtcatctatcaaatatgattaagttatagatttcttctatgcaaagatagaaattatcagtttgacaacaagcattttccgccttatctttgcagtacagaaaaaagaaaacgaatataaatcattaaaaacaaatagaatatgaaaactttagaatttatcaaattgaacgaatcgggagcaaacaacgtagtagcatctttgcaacaattactggcagacttccaagtatattacaccaacctccgcggtttccactggaatatcaaagggcatgacttcttcgtacttcacagccaattcgaaaagatgtatgatgacactgccgaaaaagtggacgaaatcgcagaacgtatcctgatgctgggcggtactcctgccaacaaattcagtgattatctgaaagtagccaatattaacgaagtggataaggtaagcaacggagaacaggcactggataacatactacagtctatcagttatctgatcggtgaagaacgcaagattctgtctatcgcttcacaagccggagatgaagtaaccgtttcgatgatgagcgattatctgaaagaacaggaaaagctggtttggatgttgacggcttataacagcaagtaaatacaaggtttaggttttaagtgaaaaacaggctgactcgtgattattcagaatcagcctgttccatgtttataaactcagattagaaataagtctcttcgtcactcactgactctctacaaaaatatcttttgttagtcttatatcatccgaagaggcaccaatcattatccggaaatctcctgtttccacaacacgcgccatattccggtcgataatggacaggtctttttcggtcaaagtgaaaaagatttccttctcctctcctcttttcaggaagaagcgttcaaaacactttaattgtctgagaggctgaactactgaagcatattcatccctcagataaagttgtgccacttcttcaccgtcatagcttcctgtatttttcactttgaatgaaacttcaaaatggcagagagatttacgtattacctgtaaatccgaatattcgaaagtggtataactcaacccatagccaaaagtgtataatggagaagcagcttgttcgacataatcatgattgcggggagcctttttattataatagacaggtatctgtccgacagaacgagggatggaaaccggcaatcgtccggcaggattataatctccaaacaaaacatcagctattgcataccctccttcctgccccggataagaagcggtcagcaatgcgtcggcatactcggatgcccagactttatccagcggacgaccttcaatatagacaacgatcagtggcttcccggtagccttcaatgcaatcaataaatcttgttgttttcccagtaaagtcaaggtagccctgtcaaacccctcgccacattccatgtcactgatactcttttcgtcagcaattgctgcacccgtctcctgatagctcgtcttgaaatcacgtgcgctggatcctcccaccaccgctattatgacttccgaacggctagctgcctccaccgcttccgctatttcgttcactgtcgtatcacgaatagcgcatccacgcacatactccaccttagaaggagacagtttggagatcactccgtctaacacggtttttatgttttcatcttcttgcggagctgtatagtctcccagcatattataacgattatccgcattaggtccgacaactgctactttttttatcttcttattcaaaggaagaatcgaattctcgttcttcagtaatacaatagatgattgcgccactttgcgtgccaatttgatgtggtccttgctacgcaccatcttcgttgctgttttcggatttacataaggatgttcaaacaatcctatttcaaatttcatccgtaatacccggcatacggcagtatcaatcactgcttcactgatttttccggattgaacggcgtgagtaagattcataaacgcatcaccacctaaatcaatatccgctccggcagaaacggcctgcatagctgcctcttctatagtaggggcaacaaagtgactttcatggactccttcaatactatataaatccgaaacaacaaagccacggaatctccactcgttacgcagtaattgtgtcagcagataatgattggccgtacaggggacaccatctattgaattgtaggaggtcatcacagacagtgctcccgcatcgatcgcttcccgaaaaggaggaagaaagttttcgtgcagatctctggtccctaccgatgcgtagttaccgttttgtccaccttccggtactgcataagccagaaaatgcttcaatgtagcgatggtagcatattcacgggacaggtctccgctacctagccctatgaccatcgccgctcccagtcgtccgctcaatacgggatcttcaccaaaggtttcttctacacgtgaccagcgaggatcacgagataaatccagtacaggaccataactgatatgcgctccctgtgaacgaatctctttagcaatcacattccctacttcttcaatcagtgtcggtgaccaagttgccgccatccctatgccggttggaaaaacggtcgttccaatcgccatatgtccgtgaggtgcttcttcagccaaaaataaaggaatacccaaacgggtattttcaatcacatatttctgcaatacgttgctggctttggcagccagctcgggattgaggccattttccaatgtcttcttagtccaagggtccgcacgataagttgcccacagcatacctgcgttcttttctttcattagtcttttaaacttttcagaaggatgtacttcatcgtcctttatttcgtacatttcccagccaagaagacataatagttgcccgaccttttcttccaatgtcatacgtgaaagcaagtctttcacccgttcatcaacagacaagaccggatttttataaggtaacagagaagattgggcaaaagccacgacattcatcgccaatcctacaatcaaaatatataatcgctttgtcaacatacaatatgatataatataaaaattactttccgctagtttcgcagaagttttcatgcggtgaaactttagttccaagctaacgaaactttagtttcaagctgatgaaactttagtttcaaacaggagaaactctagtttcaagcctcagaaactaaatgttctgccaattgaaacaaaccaaagatactatcaattcaaagaatccatcaagagatcacacaaagatataataatcactgtgttgcagataaattatctgcaacacatctgcaacaggtatctgcaacactataagccactataaatcaccgaataaacaagcaggtggcagatattgcagataaaatcaaaaaatattctagagagaggctatcgacacccaatttccgctattcccaaagaatcactttcatctaccatacgagtcgcttttaacttaagatagcgagcctcaaccggactaaagtacacattctgaagaatcggattattacggatgttcgagaattcgccctgtgctacgacttgcatcgcctcttcggtaataccggcagacaattcgtatgatgagatcaaccctttactatattcactttgatcaggtaaataatagaatgaatggattgtacgattttcaccaagatcaatcatgatttccttgcctgagattaaagcagcagtctgatcgtccttgtcactacatttctttgcttcttccgtatccactcccaaaattgtaaaagggaaacttttcagttctgaggttgccggtgtataattttccgttgcatcgggagcataataagccccgacctcattgatacacaaacatgcacgagcatccgtaaaccgtatacgcaattcttctgtttcgatcatttcaaagcgtaacaaacgtttgtatcctacggttgtagtttcttcgttgcatttaaccgacagccactgatcgccctccttatattctacaacaaaggatttaaccctttgtcccaaaggtatatactcctgaatcattacccgattcatcttcgtcggctgactaaaagtgaaagtcagatcggcggtagtcactccgtcattggttgcccaataagtgtcgtactttccgtccgttacgccacgaaccttgaattgtcctccacgctcgtcggaagctgatacttttgcactgctcaataaattatctgccaactctttctgaactctctgatggaatgaaacagcattcaatgaatcggtcggatgaatcaaaccgttgcggtctacaggaaagtttaataataaagtcgcattatgacctacactacgataatacaagtccgtcagttgatcgactgtttttaccttgtcgtcttcctctgggtgatagaaccatcccggacggatagaaacgtcacactcggcagcgacccattgatttccatcggcatgcccgtactgtaattcccgatacttgggatatcccggatatacctcgcctgcccgaaggaaagaccagttagtagctccggcaaatccattctcatttcctacccaacggcagcccggccctccgtctgagaaaatcacagcctgcggttgcagttcatcgatcatcttataagctcgcgggtaatcatagtatgttttgcggtcgatcgtacgtgcgtctttcgctcctccgtaccaaccgtctcctccgttggctccgtcaaaccagatttcaaaaacatcaccataattagtgagcaattcatgcaactgcttatagaaataatctacatactccggcgttccataattggcttgatgcctgtcccacggagagagataaacggcaaatttgattccatacttcttacaggcatcggaaagttcgcgtacaatatcacctttaccgtctttgtaaggggtatttctaatacagtattcggtaagctgtgtaggccacagacaaaagccgtcatgatgtttggcagtcaggattactcctttcataccggaattgacaaatgtctgcacccattgttcgcagtccagacgagcaggattgaacgttttcggatcagagtcgccataaccccattcacggtcattgaaggtattgagaccgaagtgtacaaaggcatatgtttccatcttctgccaatttacttgcttttcctgaggaacgggtaaaatagcttccggtgccgaaacactctgacatcctgttaaaagtagactgaatactactgtagaaatactggttgcgattggttttctcttcatggtgttcgattcatttatagttttatcttttcaggttattttatttgccggtgctaagataggaaatattatatccttaattccgcaacactattataaattaaactttttaagtacctgagcaacaaaaagttgctcaggattttgccatgtcagaattttcacttatcttagtgttgcaaaaaaaacaagagaatccgacgatagacatggcgaagatacaaattaaatctgagagactcactccttttgggggattattttcaatcatggagcaatttgactccacattatcatctgtaatcgactcaaccctcggtctaaggtgtagatcgttcggttatcagtacagcgaaatcatccgttctctcatgagtatctacttctgtagcggttcatgtattgaggatgtcactactcatttgatgaaccacctctcgcttcatccgacacttcgcacttgtagctctgatactatcctcagggcgataaaggagttgacgcaagaaaacatttcatacacatcagatatgggcaagacctacgatttcaatacggctgacactctcaatactttattgctcaattgtatatttgcatctggccaactgaaagagggtgagatgtatgatgttgatttcgaccatcagttcatagagacagagaagtatgatgcaaagcctacatacaagaagttccttggttatcgccctggcgtggcggttattggcgatttgatagtcggtatagagaatagcgatggtaacacaaatgttcgtttccatcagaaggacacgctgaagaggttctttgcgagatttgaacagaatgggctcactatcaatcgcttcagagctgattgtggatcatgttccgaggaaatcgtggaggaaatagaaaaacactgcaagtccttctatatccgtgctaaccgctgcagttcgatctacaatgacacctttgctctcaaaggctggaaaactgaggaaatcaatggcattgagtttgaattgaactctatccttgttgagaagtggaaaggtaaggcatatcgacttgtgattcaaagacagaaacggatggatggtgtgcaggatttttgggaaggagaatacacataccgttgtatcctgactaacgactatgattcttccgtaagagaaattgtcgagttctataaccttcgtggaggaaaggaacgtatcttcgatgatatgaacaatggtttcgggtgggacagattgcccaaatccttcatggcagagaacacagtgttccttcttcttacagcacttatccgtaacttttacaaggccattattcaaagacttgacgtaaagaagttcgggctcaatgcaacaagtcgcataaaagcgtttgtcttcaggtttatctctgtaccagccaagtggatcaggacatcaaggcggtatgtgctgaacatctatacctgtaataatgcttacgcagatgttttccagactgattttggataatgcctacaacttatgggaatgatattgtgtattgcctcaagtcacattgtggggtaaggggatattgtaggcagaagtgggtgcttcaagttcaaattatctgcaaattcagtaatgagaggacgtgtaaacgcaataaggacgttcaagggcttagttgcggatttgaggtatattactaatcaaccggattggtacatgttatcttcagcggtttcattaatgcccgcccgttgatcacaggatagacacgtgtttcggtcggaaagctgccggaatattgatattcaacgggcatcacaccttcttcacgggctttcacctgacggggactggtaaacttaagatctgtattaccacctataacgacaaacataagctgtatatcattatcggtatcgtttacgtatttcagtttcattgttttcgtaccgcctttgcctatggtaccgaatgccattacttcgaaattcatccaaagtccgctaccgtactcatacggataattctctgataccggatgtttgcagggaatgacggtgccttttacccaaatgcggttgtaattagcattgttattgctcaaaacaactacttctttactaaagaagcccggtcggtaggccggattgtaagtcactttcactttacctgtagtattcggtcggagcggttctttaggaaattcaaactgtacacaaccacagccgcttgttactccattgatagaaataactttttgactgacattcttaaactcaaattcatgtgaaaccagtccattttcttcctttatttctccaaaatcaaagacacgttcttcgaacaccagttcgtcagaaagagtctgtgcgtacgaggcaaccaaatacaaattaatgcaacaaatcaatataataaagcgcagcaccatactttttttcatttaaaacaaaagcctctcataataactcattagctattataagagactttcatcaatcccgtttattcattctgatacatatcaaactcagacaaaacaatcccatatccactactatacggcaataattcaagtttgacatatcgagcactcacagctccatagaaacgaatatattgcggcgttgcacgagagaaagtaacgtttccctgatactcataatcttcacctcctgtttcacttgtatagacagcggcactggacaaactataattacgggaataatactgtaatcgaattcctgttatgttttggtatacgccattcaaattaacaataacggtagaactggcatcctgagacggataagtccttgtatttccgtcgaacagagttgttccaacatctacaccattgttagtggcagtccacgcgcttctatcactaattaatgtgccttccacactcgttgctcccggaacacaattcgtaaaagaggtgctaacagcgagataagcagaggaatgagtttcactcaatgccgcattcgataccgatgttacttttagcggtaaaagataacttgtattgacaaactcgctccactttccatcctctatttcaatagtaactgaatcagaagaaagcatacttcccgcaggaatcacgagttcttttttatccaaggttacttttaccccgtcagggaaagaagaaaattcacctatggatgcacaattatcaatatccaaagtaaccgttatatctttagaggcaactttagtagagcgtacccctaccttaactatttccggtccactctctaaactagagccaatcggtgttctcaacacttcatagacaaatgtattttgaggatattctgttgaagtccaacggttcacattaatatatacataattttggttgcttccttcgatatcgtaactttcgtcatcacaagactgaagactaaataatccgactacaaccaacaatcctaagatatgcgtatttattttcatagcaatcatttatttcgttactcgttacatctgttattatcatcactgtcccatgcaatagcactgctataattcagattatatgttaatccagctccttcatttatttcacgggcagtgttcgtccaatccatatcatagccatgtcctgttgcatctttaaagatgtgtccttcgccttcattcattttccagtatgcaaccaaaccttctgattgtgaatcaacgccacaaagattcatctgtagttcgcctgtactcaaagcacggttccagacacgaacttcagcaatacggccacgaaaatactgagatccgcgatatcccgtccacgacattcctagttcaaaacgctggaaatcgaccggtttaccatcaccatcgccttgtgcatctttcactccgtctacatacatagtcagtttactgccatcatatgtcaacgagatcatataccaacgatcagtgctaaaacgtgtactcgatacaatacttccacttggacttacccactgcaaggcattgatatctaatccattttctccaaatcgcagcatacttgagcgctgttcgtcagcagaagtgaaactacacagacgagctatacgatgccactcttgagaatagcatttgatctcataggtgaagttagacaattcctgtttcttatcatctgagaaaataaagttactataaagattcgtattgctgatattcaatgaggtgaaatgaataacacgagatatctgcaagaaaatagttttcgaaggttttaatatttcaagtccatccacttctaccatagtaactggaactacatatactcgcccttctgcaaagtcttcggtagaaataactttaactgtagcaggagtagaaaacgctttacctgtctgaattacagcatcagcatcttcaagagtcacagcgccctccggaatcgcataatatttagtattatgctcattattatatgtctctaccagtgacctgtcaatggcaaacttcacatttacgtctttatctactttatcagtagtagaagcagtgacggcatacgaagaaggggtatcttctaccacaaacttggttacaggagtagtctctgtccctgtaataaaagccatattcttgttataatcaaacttatcaccttctgtacaacccagaatggataaacctaatataactcccaacaaagaatgtttaaatatatatgttttcatcatgattcttatttattcattgtttactcatttacagcaggattcattatctgaatagcctcccggaattcattataaggtatacccgatgaagaataataatttcttcctaagtagaatactccacaaccgcctttacggcctttcgacggttcccaacgtgcatagttcataagttgtcccccatcggcatagaatactccgaacgattcgcagtaaatcatcttctcgggtggaaagttactgggttgagtcaagaaccccacttgatcactataagcctgttgaacgatataatcacaataaggtatgatgtctgtcggtggtgttccactaaagtagtcaacgataagcaacttatccggctgttcgccttcaggaccaaaatacttgccaagttcctttatcaatctgaccaaatcggaaccactccaaccttcccagtcaacgtctactccatcaagtcccggttccaacacttgattcacaatccattttgcatatgcagccatcgcttcatcgtccttattctggctaagatcataatcaaccccatcaacggtaaactggtgtctgtaatgagaagcatcggcatgcatgacaaaacgtgtacccaatttccgctggcagtattgcatatccgcatatgctatcggatgtgtctctgctgtcggtattcccatccaaagatttacaatatctatactgtcaggcagtcctaccatacgttcaccccacgacgcgggatctttatagccggtcacaccttcaatcggtgaccacgcttcgtaataagcataacttatctcatgatcgcttttcttgaaagcacgcagattctcaaaatactgctcgtcatatgttttcagtttctgaatttctaacgcttccacatcggtatcacaactatagaaaaagaatgttccgataaggaaagtcagtaaacctgttatttttgttttcatcgtaattagtgtttttagaattaaacaatgtccattctcctgttatcgggattttttgtcccaccagagtttagttccacccgtatcctgaccacccaaagccgatataccactggcaacgccgctagcattgttgatcttctcgtcgcgtgtataaggcagacggcggacttgtaactgggtatcaatcgtaccattactactgtttcttactacaggaataacttccggatagcctgtacgacgatattcactccagccttcgggaccgtcgggataattggcaatccacttctgtgtaatgatgcgttccaactgagcttcaaatccggcattatcatcccatgcaggagtaaccctgctgctgaaagtataattatcactacccacattgtctgcaaaagcacccggagtcgaagtatgatcagccaaataatcgtctacaccggcggcattattctcctcaaacgacatgcgtacaccttgctcatagaatgatttggccgttccacccatatcccagccacgtaatgcaccttcggcacgcaggaagaacgattcggcagccgtcatccatactaccggagtagaagcacggttaatattcagattagagattttattgccttgataattgctcatattgcttgttgtgataccaatacgtacgccatgatattcaccgtcatcggctgctgtaaaataagagctgattcgcgaatcattcagtccgttcaaataggctacgatggtagcacccggacgacagtcacccgaattgaagttataggcaatctcgtgcaacggatgatgatattccaatgaattatgcgaaagttcggcacgttccgctttactttcgataaagccgaacatgttttccatcgacttctttgcctgtgcttctgccagtgtgggattcgcatatgaaacacgtatagcaagacgcaaacgcagtgtgttggcgaacttcacccacttctctacgtcccccccatatacacagtcatagtcactcatcagcttagcatccacatttccgttcacataattgctcaatacttcgatagcattatccagttcttcaaaaaacttattataaaccaaatccaatgcgtcatataagctggaagagccatagtttacatatggaataggaccaaatgtatcagcaatacggtgcatgccttctacctttacgatggtagccaatgcgtcaacttccggcagttcctgttcagtggctattttgtgaatactttgccatggtgccataattccggtataggcataatcaaaagtggcattcacccattgttcctgaaagttatactgcccgttatgattggtagatcctaaggtagcggcaatatagcccgaataaaggtcatgcgataagttctgagcaatctgatagtcagagtcgagcttgtcgccatcatttatgattacaacccgacgcagcatttgcgaaaagaaagcacccgtcttcaagttgtctacttccatcatttcctcggtgacttcattcggatttacgttatcctcatagtcgatacacgaaatgttatttaatagcatcaaagatatcccgagaatggaaagtttgttccatgatagtattttatttaatatcatatcttctacaatttataagtttgattagaaattaactttcacagagaatcccaaattacgcagacttggcgacataaacatgtcgataccttgaaagtaagtgcctgtacttgctgtcagttccggatcgaacggagcttttctataaaggaaaaagagattcttaccgatgaaagatacgttcaaccccttaatccagtccacatacttgttgataggaatatcatagcctaacgataactcagccaaacggacattagtcgcactgtaggtgtacatagaaccaataccaccctgagcacctgcacctccaattttcgtatagtaatcttccgcaccgattggacgaccgttaacaatggctccgccattatcacgggcaatagctgtagcctttgaagagccgtatgcgtccatcgtcgcctgtgtctgtgatacaactacaccaccgacacgtgccgtgaacaggaatcccaatgaaagccctttgtaactgaatgtgtttccccaaccgaggttatacttaggagcactattaccagcctttacaaattcatcaggctgagtaactacaacctggtccgaaggatggacatagatagctccatgttcgtccgtgcgaagcgtattcacataaatatcgccgatagatccgccttctgtcagtatcattttatacatacttgtcccgcccatatcaattctatccaaagaagtaagttcgtgcgtataaggatcttcatagttgcgcagcaattccaccactttatttcggttcaatgaataggtcagatacgaactccagccaaaatttccccatttgtcctcaaaacgcaaagacaattcgatacctttattatctacacgaccgccattgactacttccgatttatagccggtagtagaagaaagggtacgttcaaagaactgattgtaggtacgtgactgatagatagatccatccaatctcaaacggttcttgaagaagacaaagttaaatccggcttcccatgatttggtacgttccggcttcagattggggttaggacgtcgggactgagtaacaggaacgccatcaaccaacgcataagtcggaatagccagaaatacatccggtgaattacctacttccgaataagaaatacgtactttcatgtatggcataatatccgtactgcaacggaatatatctgtgataatccccgaaagaccgatagacggatagaagaaagaaccggtattcgtccctttgaaggtagatgaccagtcgttacgagccgtcacatccagataagccatagacttgtaaccgatctgagcactaccgaatatggcgcgttttttcaaatgatagccatattggttggccagattcttctctgaagtatccacgttgccaaaagtaaagaggttggctaccgacttcagtttgcctccgaaataatcagactgataatcattgttttcaaagttcccacccacattagctgttacatttagggtattatcgacaaagtacttattaatattcagcaataattcaccgtatatctgttgattctcgatattactcttggagtaataaccgtatttagaagcaaacaaagtatttgttccggcatcatacatgcgctcacggcgttcgttgttgcggtccattttggcacgggctgttacattaatccagtcagcaaattcatattttgccgatgcagttgccatataacggttcttatgattaggtattttaatatgctcggtaatccagtatggattctgtaaagccagacttgtgctgtaaggccagtactgagtcagtaaatttcgttccgaatcataccgctgatatgcctgtactttggagaaatcatctcccgcaggaaatagataaagaggtactaacgggttataataaagtccctgagaggtcatattttgttcttttacagagctaagcataaaactcaggtcaagagtcagcttatctttcagcatcttggcaacattacggacagtgacattgtaacgttcgtagtcattattatggataatacctttggcattggtagtacctaaagataagtaagtctgattcttgtcagtacctgtagaaagactggcagcatttgttacattcacacctgtctgaaagaagtctttaggatcatagctgctcggcgtattcaatttactgccccagctgtagtaactacccacttctgtctgcccataagtattttgaaattcgggcaagacaagaggagcggagaaagtcgtattattggatatgctgactgaagtacgtccttccctaccttttttagtagtaatcatcacaacaccattggcagcggcactaccgtaaagagctgcagctgacggtccactcaaaacagagatactctctatatcctcgggattcagaccggaaataggatcaccggactgaccggcaccttcgtatgagtccgtaggctgtgtagaagcggcactcatatcactcatcgggataccatcaaccacataaagagcattgttattaccattcaatgatttggttccacgcatcactacacgtgaagagccaccgacaccagctgaagatgagttaattgtaacacccgcaactttaccgttcagattattgacgaagttggcatctgcaatgcgtgtaatctcggcattgcttacttgctgtacattgtatgacaaagatttagcttccttcttgatacccaatgcagtaacaacgacttcattcagtacttctgtatcttctgtcagcacaatattcagaacttgggcattctgtacctttactgttttcgtggcatatcccacataagaaatttccagaatatctcctttcctggtctgtagcgtaaagtttccgtttatatcggtgatagtaccgaccgtagaatctttcactttcacattcacaccgatcaagggatctccgccagcatctttcacaactccttttatttggatttgtccttcctgctgaacaagttgcattttattagtcgataaaataatctgcttgtcaactacggtatacgtaatatcggtccccttaaaaatatcatctagaatatccagaatcttacctgatttatttctcacagaaacaatacgattcttctgaatcgttttgtcattgtaaaggaaaacataatcggaagcttcttctattttattcagtacctgttctacagatacattgttcatagaaatggcaacatgcgtccgttgagcatagccattctctgcagatagttgtaaaacgactgcaaaaagtagtgccagactaatcctcataactaaaggtagttttagatttaaagcatatttaggatataatgcaataaatgaatgattttttttcatacatttgcggttaactaaagtttattactataatgaactgtggtttgattccggttagcgtttgcaagactccttaccgcgaatctgaaaaattgggggaagacagctgttggtagcagctttcttcctttttttacgatctttgtgttatctcataggctattctcatttttatggttactaatataaatctactattatctttttctttgtgaatgtatcatctgcctgttgtaccgcctcctcagttctccacttcaaggcagcagacttagccagataatccaatatctgtggcagtgtttcattacggaaggtcgcacgatatttatattcttttcccgatatattattaaactgaatatctacattaaaatgccgtgccagccgtttgaatatttcacccaactcggcattgcggaatatcaacttaccgtctttccatgccaccttttcataaacatccacttttcccttcaacaatttctgatctaccttattataaagcaatcgttctcctggagctaactgaactgttgtttttccgtccggtgaaataacgtttactttacccttttctaataccgtttctatactattatcatcttcgtaagcattcacattaaatttggttccgtacacatagacacttaacccggcaggagtattgacgtaaaaaggccgtttcctgtccgcttctacttcaaaataggcttcaccttttaattcaacattacgattatctttcttaaaaacggtaggataacgtaaagtactaccggagtttaaccagacaaccgaatggtcaggaagttcgtaacgaatgactgaacctgtagccgccatgacttctgcatacttctcttcagtatccgttgctccccaatataaatatcccaaaatcaaagaagaaagtaataaaggtatagtcaagaatgcagcataacgcatcaactgattatacatactccttcttctgtttgtctttatttgggtctgtgcttgttgataggcacccattacatcaatagactccatttccttaatatcctctcctaatgcctgcgcttttcggagcaatgattccggattcatattttccatattctctttcaaaatcttatcttttaattgcaattacactaatagtacaactgaggtaatcgaaaagggacaggtataacccttaattccgcaacactattataaattaaactttttaagtacctgagcaacaaaaagttgctcaggattttgccatgtcagaattttcacttatcttagtgttgcaaaaaaaacaagagaatccgacgatagacatggcgaagatacaaattaaatctgagagactcactccttttgggggattattttcaatcatggagcaatttgactccacattatcatctgtaatcgactcaaccctcggtctaaggtgtagatcgttcggttatcagtacagcgaaatcatccgttctctcatgagtatctacttctgtagcggttcatgtattgaggatgtcactactcatttgatgaaccacctctcgcttcatccgacacttcgcacttgtagctctgatactatcctcagggcgataaaggagttgacgcaagaaaacatttcatacacatcagatatgggcaagacctacgatttcaatacggctgacactctcaatactttattgctcaattgtatatttgcatctggccaactgaaagagggtgagatgtatgatgttgatttcgaccatcagttcatagagacagagaagtatgatgcaaagcctacatacaagaagttccttggttatcgccctggcgtggcggttattggcgatttgatagtcggtatagagaatagcgatggtaacacaaatgttcgtttccatcagaaggacacgctgaagaggttctttgcgagatttgaacagaatgggctcactatcaatcgcttcagagctgattgtggatcatgttccgaggaaatcgtggaggaaatagaaaaacactgcaagtccttctatatccgtgctaaccgctgcagttcgatctacaatgacacctttgctctcaaaggctggaaaactgaggaaatcaatggcattgagtttgaattgaactctatccttgttgagaagtggaaaggtaaggcatatcgacttgtgattcaaagacagaaacggatggatggtgtgcaggatttttgggaaggagaatacacataccgttgtatcctgactaacgactatgattcttccgtaagagaaattgtcgagttctataaccttcgtggaggaaaggaacgtatcttcgatgatatgaacaatggtttcgggtgggacagattgcccaaatccttcatggcagagaacacagtgttccttcttcttacagcacttatccgtaacttttacaaggccattattcaaagacttgacgtaaagaagttcgggctcaatgcaacaagtcgcataaaagcgtttgtcttcaggtttatctctgtaccagccaagtggatcaggacatcaaggcggtatgtgctgaacatctatacctgtaataatgcttacgcagatgttttccagactgattttggataatgcctacaacttatgggaatgatattgtgtattgcctcaagtcacattgtggggtaaggggatattgtaggcagaagtgggtgcttcaagttcaaattatctgcaaattcagtaatgagaggacgtgtaaacgcaataaggacgttcaagggcttagttgcggatttgaggataacatacttttttttattttattttttaagctatcttattttccacagcttcataccaaaaacaaaaaaagaaagaaaattttaggaaatgctgattttcttattatatatttgcagtaaaatgaaaaactacagaatctcaaaataatgaaaatatctttttccagacagactaaagaaagagctttcaaacaactttacgaggattattatgcccctttctgcctgtatgcaaaaagatttgtagatgataaagaagtccgcgaggacattgtttcggatgtattcacctccctatgggacaagttggataccgactctttcgatttgcaatcagagacagcattgggatatataaaaatgtgtgtaaaaaacagctgtttgaactttctgaaacatcaggagtatgaatggagttatgccgaaaatatccaaaagaaagctcctctatatgaaacagaaacagatagtgtatatacacttgatgagttataccgaatgctatacgaaacattaaataagcttccggaaaactatcgcaccgtatttatgaagagtttctttgaaggcaaaacacatgcggaaattgccgaagaaatgaatctcagcgtaaaatccattaatcggtataaacaaaaaacaatggaactcctgcggaacgagttgaaagattacctcccgctatttttattattcctgtctcccgagcaactgtaagctctctgctaaaacacggcactctttacgattaatcttcccatttcccgtttgaggaatatgatttacctgataaatatatttaggacgataataaggtgctaagactgattccaatttagtctctagcgcacttatttccatctgcccttctatcaataaagtaacagcctgccccaaacgttgatccggaacggaagtgattacaaacgggacaggaataaacgactgaagtaacttttcgatctcttctgcctgcactttaattcctccgctattgattacattatcctttcttcccagaatcgtaaaactaccgtccggataaatgcgggcaatatcatttgtctgcagagtatcatcgcagacaagcggagcattaatcatcaaagtattttctgaagacaaaaacaactctacggatgaaaaaggataataacgatcggatgctgctgcgccattcagacggcgaagagcgatgtgagaaagggtttccgtcatcccgtaagttgaataaacagcattggacagatttctgattttttcctctaaagccttgtcaactgctccgcctcctataattaaaatctccgtttgctttaatttctctttctcttcgggtatctgaaatgtattatacacctgcaaaggcaccatagccgcaaaccttaaaggagtgtccacatctgccaatggatgaccggaagcccgacgtactataagattcaacccggcaatcaaagaacggacgactaccatcatcgccccgatatagcgaaggttcatacacaataatgccgtttcaccctgctttaaatccagaaactcacaagtcaggcgtgcactctgtatcatctgatctttgcgaacaagcaattctttaggtgcccccgtagaaccggaagtatgtacagtgatcacaggatcatcattaaaccattcgtttagaaaaagatacaagtcccatatagcagaagggtggtttccctcaccttctgctacaaggctatgtatatcgcccggagtatattcctttccctccagcaacaaacgctgtttttgtcggtcgaatatcatcatttacaaaaccacaaacaatcttttctgatttcaagaggcatctctacattatctgtaaagagtaacccggtgcctaacccttgcggcaatggattctgaaaagtagcacaccattgagcgatagcattcagaccgatattagactccagagcagaagttatccaccaaccgatattcagtttctccgcttctgcaatccactcctcgccaccggctaatccgccatgaagagaaggtttgataataatatattgcggacggatagccgaaagtaatctttgcttttcttcccaggtattatagcctatcagttcctcatccaaagctatcggcaaaggagattcggaagtaagacgtgccatttcttcccattgtccggcacgaatgggctgttctatcgaatgtaagtccagttcggacaagcgtttcaatttctccatcgcatctgttggcgagaatgctccgttggcatctacacgcaattctatttctttaaaagaatagtgagagcggatatgttggagtaaagccagttcttcttcaaagttgatggcaccgatcttcaactttatacagcggaatcccgcctccatcttcttctctatctgagcaagcattctattgaagtcacccatccagataagcccgtttatcggaatacctgcttccccacgtgagaagggtgtatcccacaaagcccagcttccttcaaaaaagtgacgaatggctgtctccaagccaaaaaggatggaagggtacttgcatagagcttccatgtccagcttacctccctgattctctacctgccggcagattttagccagcacttcctcgtaatcgggaagatcatcacagctaagatttggcagaggagcgcactccccgatccctacccaattgggaaattcgggagcagtaaaatgaagataccagacttttcgcgttgtgtatgtgcctcgtgaagttccggccggctgcttgaaatgaagcacccgcggaataatgtctattttgcaatccattgtttaagggaacttcggatatttcttaaagttaggtttacgtttctccagaaatgcattctttccttcctgagcctcatccgtcagatagtaaagcaaggtcgcatcccctgccagctcctgaatacctgcctggccgtccagttcggcattcaatccggctttaatcatccgcaaggccaacggactgagcagcatcatttcttccgcccattgcacatactcatcctccagttgctccaatggaactactttattcaccaatcccatatccaacgcttcctgcgcattgtatttccggcaaaggaaccatatctcacgtgccttcttctgaccgacgacacgagccagataagaggctccgaaacctgcatcaaagctacctacgcgaggaccggtctgtccgaagatcgcattctccgaagcaatcgataaatcgcaaactacatgaagcacgtgtccgccaccaatggcaaatccatttacggcagcaattaccggtttcggaatgctgcggatttgtttctgtacatccagaacactcagacggggaacaccgtccttgccgatatagccgccacgccctttcacattctggtcaccgcccgaacagaaagccttgtcaccagctcccgtaatcacgatcacatcaatatccgcttcttcccggcaaatgcgcaatgcgtcactcatttcagccgttgtagtcggagtaaatgcatttcgatagcgttcacggttaatggtgatgcgggcaatcccattatagtaatcaaagaggatatcttcgtattctctgatggttgtccattctctttgtgttgacataatctatttttgttttagttgatgataataatctttcagtatacgtgcatctttatttttattgctgaatacttccatcagaaccggttgttccatggcttccggttgtgtgaaggttttcatcgcttcggcaagctgttcttcattctctacccgttgataaaggaatccgcgttcttccgcccatcctttggcagatgtcttgtgaacggctgtaatatacttgtgcgatgtacccgacatatccagtccgggtaatgtatggaaaatctcccctcctccgttattcagcaaaagaatgcgtagattaggacggacattgatattccacaaagcattcatatcataaaagaaactaaggtcacctatagctataaaatttagtttatccgaaccggcagcatatcccactgccgtggacaacgagccttcgatgccgcttgtaccccgattacagcatacctcaatcgtagaaggaacctggtataactgagcatagcggataacagaactatttgccagatgcaatgcacatgattccggcaatgcttttatcaaagcaccgatagccgacatttccgaatatccgaactccggttcgggaatgatcttgcaataattctcccatacacggggatactccggcacgcggttatccagcaatggagctattttctccagaaactcaaacgggtccatttcgatgacggtagtcagagaaccgtaaaggtcaaccacttctccatcagcagacacatgccagtgttctttaggcggatgctgccgaagatattttttcaaccgcttggaaaccacatgtccgccataagtaatcaataactcgggagtcatctggccggttttctcttcgggcatcgcataaagcgccgcatcaaaattcttcactggaataccgggtactgtctgattaccgatatgctcggtcagccacacgaaatgtttatataacaatttggtatgccgtttctcaaacaagtaaatcaagttcatctgtccgacaataatcatccgcttctgatatctgttcaagcgttcgatcaggtcattgtaatcccggtcgtatacattcagcccctgatagcgcgtgatgacacgtacttcgggaagcgactccaccgtaaactggaacaaaggttcggatataggaatattaatatgtaccggaccttttccatgatggttggtttccagcaaggcttcattcaccaagcggttacagtaccattcatcctcttctgtctgaatctccggaaggtttaccgacttcttgaccaatgtctgaaaaacaccgggctgcggcaatgtctgtcccgccatctgtccaatccaggcagcaggccgatcggcagagataacaactaaaggtatattctgataatacgcttctgccacagcaggatgaagattgagcaacgctgtaccggaagtacagcaaacggcagcaggatgcccgccattcagcgcaagaccaatcgcaaaataaccggcactccgttcatccgtcatagcataacaagtaaaacccggatgagtagacagcgtatgcacaataggtgcattacggctaccgggacataacactactttcgtaattccatgcgcctcaagcagcgcgaccaactggagtatatttttcttgtccgaatacatattgatagtgattagcttgttagtgattcatcattattggagcagatacaagaatacgcctcatggtctgcaatttcttttccgtttcctgccattcatcattcaactctgaagaggctaacaatccgccaccggcatacagtgtcaattgctcgtcttcaatgtgcatgcaacgcagattcacatacaaatctgtgcgtccctccggatcgagccaaccgataaaaccggaataatacttacgatcgtacccttcattttccaaaatgaaccggtaggcttcttctttaggcagtccgcacacggcaggagtcggatgcaggactttcagaaggtctcccagatttttattatctttcaaagagaaatggaaatcagttttcagatgtgacaaggcaccggcataagccggataaggtccgctctctgtggagcgaatgcccagcgaaagaagctgccgacggatataggacgccacataatcctgctcctgacggtttttgtcatcccatacttgcggaagtttaccattctgcaaaggttgagttcctgccagggcaactgtgttccattcatttttttcgcccgacaatataatttcgggagtacttcccagccacacgcccgtctgaggagtataacacagatagatataggaatgaatataacgttgacaagctgcacgaaaaacagctgaaggggaaaactccggattctttccaatagtgagactacgggaaagcaccagtttatcaaaggtagcatcacgcaaggcttcaataaatgtatgaaaacaggtcgcatacttcccagtacaaagggtatgaaaagattcctccggataactttgcaagccctgctcttcctctgccacgatttccataggcaacggttgtccagtcctgtcggactgtatcaacacaatcggacatgacttatctacacggaacggagcaatcacaaatcctctttgtccattcagttctttcaaatcgaaaatcaggcggacagctccgacatcttctgtcaacagacgaggatacttctccccgggaacacgataaacagcaaagggctgtttccgctgaataagtgcatcaatagttgtcaagttacttttttcgtcaatcatctttttttcatcacactgttgaccacccgtatagaggacaccagtttattggttgaagtaaaaacgtccacattccatacatgggaggaacgtcctttgtgtacaatcgtcgctactgcacgtactgtatcaccttcgtgcgcagaagatatatgatttccgctgacctgcattcctaccacaatttcatccggctgacagagaatcatcgagccgagtccggcaactgtttctcccaatgcaagcgtagctccaccgtgcaaaataccgaacggctgacgggtacggtgatctaccggcatcgtcgcctctacacggtcttcgtcggcatatgtatattggatacccagattacccatcaatgcgtgacgcgcctgtgcattcaactggtccaaaggaatctctgcagcgcgaacttccgctattatcgccttttcgacagccagagccactccgtcttcctcattggaagctgtcacataatccgcacagacctttaccgaatcctgcgaatgccccatcgccactcccagtcctgccagctgaatcatcgttacatcgcacacaccgtctcctatagcgatgacttcttcacgcttcacattcagttcttccaataaagctcccaatgtgttggctttatcaatcgcacacggcactacttccagaaaataaggttcggaacggaaaacatccaaagctccgttcaaccgtctcttccagtgtccttccagactaaccaacgcttcctcgtcatcgctgacaagcatacacttacacggagcaaagtcaattgctacagaaaattcctcttccttgatcactttcaaattattcaagcgagcttcattctggatatgttcattctccggagtgtcagtaatgatcgtatcatcatggtaagtgaacagtgcgaaattattttttcttgccttcttttccagataaggcaacatttccggattaatcctccgctcaaacagtatttctccgttttgagcattaattatctggcaaccattataagaaaggatataacctccataatttccgagttctagggatttggctaaaggcatcagaccgtaagtcggtcggccggatgccaacacgatacgtactcccatctgctgaactttcagcaaagcagccaatgtacgtttactaatttcttttgcatcattgagaagcgttccgtctacatcaagaactaataatttatacttcatggacacacgattttgatttagattacaaaggtaggaaattgagtgaacgactgaaagcggaaagagataaaaattactttaatttcactctttcagatgcatttccaaataatcacgaaggattcgggcatgattataaaccggttctttggatgcataaagcaaagtgatcaccagatgaggtttgataagagtcagaaaatcggcaacagcttgagaagcttccagttccttctgatacattacgacaaaatcattccagtgccccggaatatcttcatgaaaccatctgcgcagtgctgcggaaggcgttatatcttttgcccagtaatcatatttcaaccattcttttttgattccacgtggccagagtttatctaccagcacccgatatccgtcggtctctgaaaagtcttcgtacactcgctttatcctaacttgcaccatttccgtttatatttagttatcataagaataaaccgataaaacggaaaattgtttatcgaaaaagccaaaatcaacctaaggattcctgcgcttttttaaattcgtaaggagtcataccagtctttttcttgaacatactgtacagaataggcgtactattaaatccggcttcatcagctatcgcacgaatggtataattgggatgttgcttcaataactgaatcgcatagttaatacgaagttcattaatatacccgttgaaattagttccggtgttttccttgatcatccgggcgaaacgcgcattattcaaatgtacaatctgagccagatcctctctcgacaattccggagacagatataactgatcctgaacaacaatacgattcagttctttgaaaattttcttattctcatcctcttcctccctactctccactacttcatccggagataaatcgtctttttcggaaaagccagtttccggttccaagtccaatggaacagctatcggatcttccgcatctccatctatgaataattgtttgttctctacttttccagccagtttctcattgataaactttgccagcattttgtttttatatttaacaataatcgtatgacgccaaatccgccatagcacaaataaaatgagacaagtgacacatcccaaaaaagcaagtgatatgtttctgattcttaactgtaaagtctgttcggcaatatattcttcctgctcgtcagctttatgaatagcatttaattccaaagccgcattctgcttatccttgctgttaataccatcaataatagaaataatagactcacgtaatgctgctactttttcaaaatccttcaagcctttataagctttcacctctttctgaaggatactaatatactgcaagttgacagtatcctgctcttgcatcaatttcttaaaatcctgacattgatcaacgactttctgatattgtttagacactagcagataaggtatcgcataggtttttccatccggtgtctgtgaattctctgttgacaaatattgttgataatatttttccgcctgatcatactttccttccagatagcagatatacgacatttttgcatacaagtaagtatattgcagatcaagaaagccttttgttttttccggtaatttagctatatctttaagtagcttttcgcgcttcaacccaacctccaatgcttctttactacgggaatcattgagcagataatccattttcatcccataaaagtatgaaagcatagtcatttccaatttggaacttgtaccttgaagcaatttgatagctttgtcaaaatagtcatatgcctcctctttgaaagacaattgccatttattttcaccaatgcaaaacaacagcttactttcagcccctttatccttttctttttgtgctagcttgataccatcaagagcatacctcatactctctttatggtcactcataagcactgctaattctgccaggtcgacagtcatggtcaacaagtgcttaggatctttctgagaaacggaatccagcaaataagactttttggcatacaaaaaagccagtttagtcatatacatattacgataaaccctgctgcgtaattcatatataatacgcagagggatagtcttcttactttcagctccatccaacaaacttaaagcccgttcaggttctgccatataaattcgacttatatactcactggtatatagcgaatcattctctatagttttgtcggcgaaaaggagctggttaaacacaaacaaaaacaaacaaaaacaaataaccgagcgaatacttttcattataatcccaatgattttactccccaaaagtaaaacatagtttcataaaatgcaagaattgaacatatttgaatgaactaaaataagaaaagttagtgattataaaagtcaagagccatcaagtcttccccaccaaccacatacaataaaatactaaaaatcaagcatatgtcacatacataaaacaaaacatctcaacatacaaataaactgccgattctattaaggaatctgcataagatcagagcagcacatgaaaaatcgaaccgaccagtctaaataaacaccagacaattattaacccgccacactcatcagagcaaaacagcacaaaaacagaaaatcaaaaaagagaaacacatactgtaataagaaagattataatcccaacgctttatcaaaccgttgctccatacatgcactcaaatccgtcgttacaaactttcctttatagaaaagagaaaagatagtagcaggtgtaggtgcattttgtgcttgtgccatcgtttccaatctgactatcttcaatggaatacctttgttctcagtcacacccactaaagaattacggacatgaaactctgcaaacggacaacgatgtgtataataaacgactacaccttctttttcctcacattctccacttgatactgttccattgaatgacggatcaggagctgccggatttatcttcaaagccaaaagactgaaaccatagggtagtttttctatcgtctcaaacccctgacgtaataaccatttcgcatcacccataaaatgaaatttagaggtaccgaccacagtcaccaagccatccctaccctgtgctttggcatcctcgacagcagactgtaatagtgctttgccatgcccgcatcctttatattttcctgaaacccaaaaacagtttatcattaaatagttaggtgcattaaccggaacccaagctttttcggcaggcccatattctataaatacttttgcacgttcgtcaagccgtctgaaaacatagccattctcaaactcatttttcagccatgtctttttcaactcatagctatccttgcatttcttatcggagaaagcacagcaaatatgttctttttcgatattctctttagtcagagtgatatacttcgcttccataatattctgtttattagtatataaattccggttgtccattttaactacagcaaagatacacaatcgaaagtaataaaacattgtccagtctcgtcaaaatgacacagtagtacggattaaagttcggaaaacagataagtaaataaacctgagtgacaaacttatcaaagaacttattgaccactctgtggaagaagtgatcaaaaaactccctaagaaaaaacaggaggaatatcgcacaatgatttaacataaagcgtgaaaccgctgactggtaaccatacaaatatccggctttgctgcaattcacaatagtaaagccggatatttaactgttaaaagcatatatcccatataccacaagcactttccaatgctactagtgaagcggcatatcctttcattgtttccagatactcctgttgcacttcattataagtacgctgggcaaccagtacatcaagaatactcgtttctccccgtttgtatttatataccattccgtcgagcaccttctgcgagtcttcaagtacaccggctttatattgagctatctttttcttttcagcctcatagttgaaccaggcctgggttatctctgcctgtatctgcaattccatatctctttccattatctccgattgggcaatccgaaactttgcagcttttacagctcctttatttatattcgagaatgtcagaggaacagatacaccggcagtagcagaacgggacggaggaagaaagccgttccagtttctttcataagaaacagatactccgatatcgggtctgcgttccgctctcgtcagtttatattcccgggtagtaacttcagtacttttttgagcaacaagcaggtcgatgcgattatccagtcccgctttgaccaaatcagacagagcaaagtccctgcttagctcttcccaatttcccaaagggatatgaagcgtatcagcactcatccccatgtgtttattcaacaaaaccaaagcggaatgataagccgcctcctgactgtaaacagtattaagcaaggtgacagcttccagttttgactgccggacatcattctccgtaatctctcccgaaacataacgtaaactatctgactgactcagctgatacatatactcataagaacttttctgtacttcaagtaattcgcgctgaagaattgcttctagaaaaaggtcggcagcctccgccctcaaatcctgaaagccctgttgcaggaccagtttctccaattctgcctgagtccgcgccaacttaatacgtgctccccttttatttcccatttctaatgaataggaaactcccaacgagaaagtctcattacctgcttcaaattccaactccggatccggaaagattttccgggcaattacttccgcatcagcaatactcacattgagtttttcggctaaataactcaggttctttttcgctacccgattcagatattcttcgaaagaaatagactgccccagctttatttcaggcatttgcgcaaaagccggaatgagtacggcttccaccattaacagcaagagcactatattatatcgtatattctttttcatcgttcttctttttatttaaaacattgttctcaaccagataatagaaagccggaagcagaaacatagagataagggttgaaaacatcaatccatacacaatcactgttgccagcggacgctgtacgtcactaccgattccggttgccaacgaagccgggaaaagtccgagtatcgtagtgatcgaagtcatcagaataggtcggaaacgctggcgtgccccttctatgaccgatttccggagttccattcctcccctgcgcagcccattgacctgcgataccatgataattccattttgtatggaaagcccgaacatcgctataaatcctacggcagaagatacattcagcgtcataccacgcacattaagagcaagcatacctccgaaaagtgccagaggaacaatagccaataccagtcctgcctgccggaacttcccgaacgtgacataaagcagtataaacatccctgtcagtgtcagcggtataatgacagcaagacgtgtataagcccgtttttgattttcgaaggcccctccccatttgatggtatatttattcttgtcataatgtactttctcattgatcgtattctgggcttcattcagaaaagatgtcaggtcacgaccgcgcaaattcagctttaccgtcaaatggcgtctgttcatttccctggtaatcgtactttcgccgacactcaatctgacatcggcaacctgagaaagaggtatctttgcaccggtggaagaagtcaacataagtccggctattttctccggagtattccgcgcttcctctttatacttacaggtgatgccatactggcggtcaccctgataaagttgtgcgatagctttacctccgacagccacttcaatcagatccgctacatcggatacatttaatccgtaacgggctatggcatcacgattcatactgatctgtaactgtggcaagggtggttcctgatcaatatccagatcaacagcccctcgcacagttcctaatgccctggttatttcttcggcaatacgacgtgtttcacgaaaatcttcgccatatactttcaccaccagttcactatgggtcccggctatcttatccatcaccccgtctatcataggttggctaaatcctactttaaaaccgggaagtaacttatattcttcttccagttcatgaatcaaatcctttttagtttttcctttcggccattcatcataaggcttaataccgatggacacttcaaaatgtgaaggggtgaacggatcagttccgtcgtcattccttcccgcctgtaccataatataagttacttcggaatacttcatcgtacgggcacgcaaagtatcggataactcccgtgacttttctacggaaattccgggtggcagattaacctgtaaccatatcgaaccttcatctagctccggaaggaagtcttttcctacgacaacactcaacacgatccccgctgtcagaatcagtcctgatggaatgatggcttttaagggagcttccagaaatcttgtaatggtacgaatgtatttatcctttagtctgtccagccatttattcttatatattttatgtggtttacgatagattgcataggcaagtcccggaatcaataagagcgcaaccaacagtgctccaatcattgcatagctcatcgtaaatgccattggagtaaaaagtttgcgttcaacacgttcaaaggcaaacagcggaaggtatgccgtaataatgacaatggttgagaaaagaataggccgacccacttctttggcgcgttgcgccatgcttttttcttcgagatattgtttgggattatcctcacgtttcttaaggatcgtttccagcataacgatagcaccgtccacaataataccgaaatcaatagcaccaagcgacagaaggttagccggaatatccgtcagatgcataagaataaaagcgataagcaatgacacaggaatcgttatagataccaataatgcaccacgccagttgcctagaaacagaataagcacaagaaacaccaaagccatacccatcagcaaggtatgggatacggtactcaaagtagtatccaccaagttggtacgatccagaaaagtatgtatcctcactccttccggcaatgtctcattatttaactcatcaactgccacatgaatatcttccagtactttagacggattctcatgtttcagaaggagtacgattccttccagactctcagagtagttgcgggtacggtccgtatatcccagcactccctttctttcaagatttccatacttcaaagaacctatatcattcagaaagacaggaactccggaagtagtactcactacaatatgtcccaaatcgtccaaatttccgattaatccaattccccgtaccacataacccaagtcaccacgattcaacacgcttccccccacattggcattgttattctcaatggcttcaacaacctggctgagagataaattatattgttccagtttggacggatctacttcaacctggaactgagtagtgatcccaccgaaattggttacatcagccactcccgacacttccttgatacggggaataattacccagttctgaaggtcggttaattcgcgtaatgagtgctggtcactttctatgatataacggtacacttctcctacgggagatgtcagcggatcaagtcccggaacagctccataaggcagttctacttcattcaatctttcctgtacgcgctggcggctccagtagtcctctgtcccgtccttaaagacaatggtaatcattgacagcccgaatgtactcttactccgcatgacgtgcataccgggcagcccattaatagcgcgttccaaaggaatggttatctgctgttccacttcctccgcagccagtccgggaacttgagtgaccacctgggaagtgacatctgcaatatccggatatgcttctatcgaaagctgtttccatgagtaatatccaaagatacacatcatcacaaacaggcaaagcattacccatcttttttgtataattgaaagcattaattccttcttcataatttcttactttaaataatatcctccttcactgattatcttatctccgggacgcaatccttcgctgatcaccgctattccgttttctgttgtctccactgtcaccgacgtccgtacgaaaaccaacggagcaatctgcacaaatacatagctatccttttcgccctgtagtaacgttttctccgggatttgaatttgtccgaccggaacactcagaaagtggacagtagtgtacatccccagcttcagatgtccgttcaaattatcacagaccgaaagtacctgaatggaccgggtttcctcgtctacctcctcctctacatgatacacattgcctttaataaccgtaccgggcaatgccgaaatttcaatatccagactactgccttcatttataaaccggatatctttctcctttacctgagccgcaatccataccttagacaggtcggcaacaatagctatcggttcggtatcatctttcagatattgccctgttacgatgttatcctttatcacttccccgggaataggagaacgaacaatcatcggttgccccaatatcatttccgccggattgtccacctgatatacccgcaatgcggcagaggcgttttcaaactccttatctgctatcaataaagcattctgggcttcttccagttctctttgcgaactgacaccattccttatcagatcttctttgcgtttcaaatcttttttagcaagttccctggacgaaagtgcctgaaagtattccttttgtgcagaagtaaagtcgggggaactgatttcaaataaaggtgttccctgacgtaccgactgtccgatacgcacataagattttgtgactctccctgcaaatggaggagcaacataagcataacggggaggaatgggacgcaccacaccggacgttatcaccttcttggaatagggtttcagttcagacactgatactttgatcttttcaagtaaaagaggatctgcaatatagaccgtgtcaccttgtatacgatagccacttttttgctctgattcctgtttatccccgcatgcggtaaaaaacaacacactgccaataataaatgtgtgtaactctctcttcatcatcataattaaacataagttaagttagtaaccggatttccgggcacaaagatagacggctcccttcggagagcctgttagagaatagttagaatcctattagaatcttattagagtaaataaagatttcttcttaaaacagcagttttgttgttagagagtacgcacaaataaggggttgactaaaaagccaacccctcaacggatgatattccggtatttttatcgtaagccgaaaagttcttattctttcacacaacgtatactttgagcaaaaccttgatatgacaatctgaaattatgagaattatatgcagactcaagcgaccaggctccataacgtattctcctgtcataaggtggattctgcaattccgatctcatataaggaggacctacacttgccgaccaatagtatccggtactacccctactttccaaagcaccacttgtgttattcagacgaccggctgacggaaaaaagacagatgcattcgttccggaatcgggattaaaatacaatactccctgataagcaacattactatttcctaatgatacgccatagtttccattcgaagcctcttttatcggacgtctgtcgaaaaatccgtccgaataaaatgtataagttgttccttttagttgtttccgggcaagcatatctttgtttgctccgtaaggatatgtcccaggacctgtattaccagttccaccaaaaggagtagtaaaagctgtagcgtagtctgcacttgaagccgcatttcctgcaaaaggtacattaaataaagaaacccttaattctgaatactctatttgatctttataattcgtggcagtacccgtagtaccctcatccggcaaataatcataatatccattataagatattttatccgtatagccatctgtcggacgacgatatcccggagggcaaacttcaaactgttctttatatgcaggaatattagcactgacatctccatcccacatgatcggaaattccccatatccccaagggaatcctgaaacaagatatgacttcgagggattaaaagctctgcggtaataatcagtcataccggaagtagtgcctttcaaatcgaccgcccactgaaagaatgcacccgcctgcgaagggaagtctacaaaacgagcaccttttacgttcacattctcataatccggattcgtattccctgctaacctctcgcttgtcaggtttaaagcagagaacttagctgctcccctacgggcattcgtcgataaaagacgcatatcttctctcacatgtgtagtaatatccgtacctccattccacgctccccatacagttcccggaatagcatcccccggcgcatatatataagcaccggcttcgccctgacgaatataaattttcattgttgtccgccatcccggataatatgacaaattgatatatccaaatttaggatcggattctttagttggtacaaaatcggcattttccttaacgccaatacggaaatatatacgaccggtgagacctgagatactagtaccatcttctcccctatacggattgagagttaccggataatgttccgcatcacctggtgattctgttccaatattcggatcaaagctgggagtcgcgctcacaacaagccagttttgataggcaacaggtacactaacagaccatgtttgatccaatcgatgctgtcctgttataatacgttctcctttctggttatgtttaaaaaatgctgcattgaacaaaccatgttgatttgccgtaggattgtgcacaaatcgcaaaccttcttgtgtgacggtaacctttatcttcctctgcaatgcattcttaccattagtatcctctgctgcagataatgtcaatgtatatgtaccactcatattctcggtcctgtcatgcgtaccaaaaccggtggtatttgttccgtcaaccagtaaatccatatatccgctgcccgaagccgaatcataaaagaaacgataaggatcaggattattatcatctactgccaaacagttaaagactgtattagttgctctttcattcgcttcaccttctttctttactgtgcccaacaccttcactaccggcatattggaccagaaagaaatccggactccgttcatatccgtcatcttagcctgtatatgcgatacattcagaacacggacgcctgatatttcccaatcatctccatcgtcaatccacggagaaggctgtatatttacttctaaaggttctcttatgatacctgtcaaatcaagtttcgcatttgccggtaatgtataatccgggtcggacagaatcttcaatttgcaggaaggactatacttgtcaatcaggttaacagtaaaatttatcgcattcgtctcgtcggacttcgatgaaaagaagctagatggcagaattacttttttaactttaacagcccagactaaatcgttatttttatcctcagtggtcaataaagtgggatctattttaaaacagtcggcattatcagctaatgtgagtttacgttccacatttctggttatggccgttccaccataaggaagaaccggatcggcatacgcccaggaactgggtaaacaatcactaggcaagccatataccaaaggcactctatccggtatattagaaaaagtaattccttcaaattcactcgaactggcatcaccaaaatcgactttcgatttcaaaaccacatccacacgtgccgccaagcgtctgagtcctactgtcaacttggtagatgcaacaccatttacctccaagtttccatcagccagcacttttatactattattttccgcaatcataggtataacccgttccgaatcgaagaactccgccggataggatattgactttagtgcatcataatcagttatattgtcaagaaccgccttcacaattgtattatgaggttcattggccaaaaagacaaaatcatattcacccttattaatcggatgccgtagcgtatttccgcccagcacatctccataataaaaagtattactttcgcagatgcgacttgtcttattgaaagccagaatacgcagagtttcaaccttatcatcgagcccgtcacccggataggctcctgtataggcacgtgtattgataccggtaattgttatatatccctctttaggtgtatctttataaaactcatcaacacaggaggaaaacaataaaaatataaccaaaaacgacaaatgtaaatagtttctcaatctaacaacaaacatatattcccttgatttgatatttcctagcactataatctcatactacaaatatcggcatatcaaagaaaaggagaaaggagaattaatactcatatagaatatacagagagagaaacgactctattatcgaaaacaacaacaaatccaggcacattataacaaataacggtcttaatcatcaatattttttcattatacagataatcttctttaaaaatatccgtttatcgaaaaaacaaaatcagctattccaaaaatcgccaagccaaaattctgctattttttgtaccctgacacattcgaattatcttatattccgatacatggacggcttttaatttagcatatagtttatccagattcttctccttagaaaccagacttgtaaaccaaccgcaattcttccggtatttccggctctcagaaatcatattcagcaaaaaatgtaattctccaccctcacaccaaagttcattcgcatttccaccgaaattcaatttggttttctttactttctcccctttcagactactcaatttacgtaatgtcccctcttctgcttcttctttcgaactgtgaaacggaggattgcaaattgttacatcaaaatattcatcgggagcaatgattccgtcaaaaatcctccgattgtctttctgaagccgcaaatcaatcttatgtgccaatacaggattgcaagtcactatcttacgcgcattttctatagataccggatcaatatcggaacccacaaacatccatccatactcaacgtgcccaataatcggataaatacaatttgcaccgacaccgatatccaagcatctgcactgtcgttttggcttatctccattctcttcatttgccgtattactgactctctccggatcaattaaatcggcaatataatgaacatagtctgccctcccggggataggcggacacaaataattccttggaatatcccagtagcggataccataataacttatcagcaatgctttattcagcgctttcacagcatgtggattaaaaaaatcgattgtttgtattcccaaaggattgagaagtacaaattttctgagcggtggataattctctgtcaacaatgaaaaatcatattgcccattgtgtttatttctcgtatgtagttcgcttctttctgccatggcgacaaagatacagagaatctttctgtctgcaaatgactttcatacaaatcatgaagatacctgattacaactgtaacaagcatcttcataattaattatataaataccatatacctaatccttcttcacccaaacagccaggttacgggattcgacagagaactctccatttccttcttcatctaaagttatttcttcggatatacttccggttatttcgtgccagacttcgcctttatgtttctcacccaagctcattattttacttcccgcctcgtcattagacataaggaagaccagcccggagccattatgttcctcatctcctgtacggataaagccaatcgttgaaggatggtcgaagtattctatctgatcaccgtaagcgtactttcgtctcgcatccaacaatatatcaataatccgggtatgaggagacttctccccctttataccataataatctccataaaacagacatggataaccttccttcatcagcaaaatcaaaccataagccaacggtttaaaccaatcttctacattggattcaagagaacttccgcgttgcgtatcatgattgtcaacaatggttacagccagatcgggatgatgttcaaccagagtatcttttaaaatatcccgcaaatcatagtctttaccttcctgtgatgcctggaacatattataatgtaacgggacatcaaataggtttactttgtgcccaacagcttctatataagcatccaatgcttccaggtcaccattccaatattcacctacggcataaaaatcattgcctctttcactcctcaccgcatcgaggaattgtgcgacgaattgatctttcatatgtttaatggcatccagacgcattccgtcgagattcaattcattggaaacccactttccccaacggttcaattcagatacaacttccggatggtccaagtcaatatcgttacataacagaaaatcataattaccgttttcactatccacgccctcactccaagcttttccttctccctgtatctgaaaaacaccgctgcgcttttgcgcatcatcaaaacccgtcccggaaaaatgataccaatgccatttaaaatccgaatgtttgtccttacgtccgtgaaaactatacccggtccacccttgtatctcaaacggctcacccaaagccttggttctctccttgggatcgacctccactaccataaacttttcagtaaaatcaccacccgctttatgattcaatacaacgtccagataaacagcaatatgatatttgtgcaattcgtcaatcattttcttcagttcatctttcgtaccatatttagttcttatggttcccttttggtcaaattcgcccaagtcatacagatcataagtcgcatatccttcgtcttgctgctcatcggccttataagcagggggaatccaaacagcagtcacacctatatcacgaagatgcgacgcatcttcctttatctgtttccataacttcccgtcattcgggagatgccattcaaaatattgcatcataacaccattttccatacgcttcattttttttataattaactttatacaaaacaaagatgatgttaacaaagttcctacgtttctataaattataagctaacaaatacaaaaaagtgcaaaggataaaaagctgatttacaacaccgtaaaattaccttaattattcttttattattcatatttatcagagcgtgaacaggaatttttgatttcacatttgttttcagtcataccataacggaataattcggttcatttattccacaacataattattttttttatatagtattaatataaaattagaaaatatgagagagttgaaaaatcatccgtccccggaccagttggattcgtatgacaagtatccgtgctattatgagaacgatttggaattagtctatacaccccagcaatccatatttacgctatgggcaccaagtgccgataatgtccgtttaaacctgtattcatccggcgaagcgggagatccggaagaacaactggaaatggacatagccgacaatgggacctggtgtatccatatagaccgtgatctgaaaggttctttctacaccttccaaatagaaaaagatggaaaatggctggacgaaacacccggtatctgggcaaaagcagtcggcatcaatggcaatcgcgctgctgtaatcgactggaacgagacaaatcccgaaggttgggaatcagaccagtcacccgaactgaaaatgtattccgatatcattctttatgaacttcatcaccgcgattttagtattgatccaaactcaggaattgaacataaggggaagtttcttgctctgacagagaccggaactaaaactcccgaaggagaatcttccggactggatcatttaaaagaattgggagtaacgcatatacacatccttccttcattcgatttcgccacaatcgatgaaaggaaattggagaaaaacaaatacaattggggatatgacccgaagaattataatgtaccagatggaagttactccaccgatcctgtcacccccaccacccgtatccgcgaatttaaagagatggtaaaaagcctccatcaaaatggttttcgtattgtactcgatgtggtttataaccatacagcctcaaccgagcattctaattttgacctgacggttccgggatatttttaccgccagaatcccgacggttcctattcaaatgcttccgggtgtggaaatgagacagcctcagaacgcgaaatggttcgccattatatcattgagtcggtcaaattctgggcgaaagaatatcacattgacggttttagattcgatctgatggggatacatgacatcgacaccatgaaccagttaagagaggaattattaaaaattgaccccaccatttttgtatacggagaaggttgggtagcagcagattctccattacctttcgagcaacgggctgtaaaggagaatgtacgaaaaatgaaaggtatttccgtatttaatgatgaatttcgtgacggtctgaaaggaagtacctttgacgaacaggaaccagggtatgcctccggaaatatcaacgggcattttgaacctgtcaaatatggaatcgttggcggaacacaacacccacaggtagattatagcgggttactttactgtgacggtccatatgccgctgctccctctcaaatgattaactttgtttcctgtcatgacggatatacgctggtagataagctgaaattatctgttcaaggcgaacattctgaagaagaactggttcctattgacaaattaatacacaccgtgcttttaacctcgcaaggtattccttttattcgtggcggtgaagaaatcatgcaggacaaacagggagagccaaacagctacaagtcttctgacgccgtcaaccaaatagactgggcgttaaaagctaaaaaccgtgatatattcaattatatcagaacattaatcgcactccgcaaaaaacatcccgccttccgtattcctacagcagagggcttagagaaatggcttcattttcttgatacaggcgattccggtgtcatcgcttatactctaggcgagtatgctaacggtgatgaatggaaagaaattctagttgcatacaacggtaaccggaatcaggcagacatcaatatcccggaacaagattggattatagtctgccataacggacaaattgatctagacagtcaggagcatttatcgggaggggatatttctatcgcagcatcttcagctcttatcttgtatcgtcaataaaaaggagatcaacttgatattattaaataaaagtacaattataaatcagttagactatgttagaaaatgaattatggggaaatactattgaaaactggggtatttccattcttattattttaggagcaattattattgtgaaattattatcgctattaggcaagaaagttatcaaaccttttgttacgggaaccgacaatcacctggacgacgtcattttttactctttggaagcgcctgttaagtttgctataattctgttgggaatctggatcgctatccatcggttggtttatccggacagttttgtgaaagtagttgacaatgcttacagcattttgattgttctggatattacttggtttttcggccgtttgttcagtagtttacttcaggtttactggggaaagcagtccaacggacaagctaacaaaatgatgccaatcatcaaaagaaccatcttggttatagtctggctcatcggcatcgtcatggctttgagtaatgtgggagttaacatcagcgctctgttgggaactttgggtattggtggtatcgcatttgctttggcagcacaagatacagtaaaaaacgttttcggtgcgtttaccattctgacggataaacctttcagcatcggagacacaattcgcgtggatagttatgaaggaacggtagtagacgtaggagtccgaagcacaaaaataatgaattacgacaaacgtattataactttccccaattataagattaccgatacttctatcgttaatatttcatccgaacctatgcgccgagtagtcttgaatcttggactgacgtatgatacgacttccgaaaagatgaaagaagctttagaactattgaaatccatccccaaaagagtagaaaatgtatcttctaacccttctgatatagtcgctgtttttacagaatactcagattccgcattggttatcatgtatatctattttatagagaaacaaggagatattttaggcgtaacctcaaatatgaatatggaaatactggctgcttttaataaagcaggattgaaccttgcttttccgacacggactgtctatattcagaaagacgaatcattgaaacaagaaagttgataaacccatcgttctcttagaaatatgtacatgcagcccaacatcaatgtgctatttttaagattaaacaaaaatacagttgaaataaaaatagtaaaacaaagaataaagcgcataaattagtgcaataatatacggaataacagattattattgcataaattcacatgagatatgcatctttttctatcactaaaccactcgttggtcttaaaggaacgcctccttggtttaaaaccaacgtattcttcctcaccgaggaacctgtttttcctcggtgaggaagagataaaaagactatccggagcttgttttcacgctggctaatcacaaatagcgaaaaggcaagattaaacaaaaagttatcctttcagtcaatacatcatctaaaagaaaacataagaagtaatatcatatcaatctattcagcatacaacttaaataaaagaaagagagattttcattcaagcaaatgcaggcgtttttctacttcttatttatccgtaatgtaatttacagcattccttggctgattaaatattccttttttaagaaagttctttttttcagcaataggtaagcctgagcaatagttaacgaacgactaacaatacacaaacgatcatagtaattagtaagtctgcaagatcttttcgaagcagctttgttgcctgttgtatacgataagcaattgtttttactgaaaccccggaactctcagctatttccttatagctctttttagtaaaacgatgcataacaaaagcctccctataggaagcaggcaatgcatctatagcttctttcactctttttgaaagctcttggaactggtaagtctctgcatcatgtatcagcttttccatctcctcataatacatagtatcagcatgattcttcagctgtttttgcttgatgcagttaagtgatctatggtaaaccgatttgagtaaatatctgcctaaggaagtttcaacctgaagtgtttcgcgatgttcccacagccataaaatagcgtcacccgctatttctttcgactcttcatagtctacaaacctatttccatacgcacaaagaatcgggtagtattttttaaatatactatcaaaagcgatcatctcccctctccttagtgccatcaataagtacgcatcttcattgctgtattccatggctgcaatgataatgcttatattttaaataagcgtaaaataacacagttattaaccataaagtttattaatgttaattatttaaataaccttagtagttttattttcccgcttgtctctttaataaatttatcatggaaatgcatcattcaactatagaagacttgctgatcagctattatgatggtaaagcaacagcagacgaaattcaggaaatagaagcctggatcaaattgtcagatgaaaataaaaagaaggccatggacatttacacacttcttcttatgactgacacgcaacaggttactgaaaaaatggatatggatgaggagctatcaaaagtgaagggacggatgcaagagaataagtatcatatttcctggtggggttggatacaacgtgcagctgttgccttactcataccgatggctattactattttggttttgcttaaccaaccccaatctaccgcccccgtccatgcccagatattcgaagtccggacacaacccggaatgataacttctttcagattaccagacagcactttagtgtacttaaactccggctcagtcttaaagtatccttccattttcaccggtaacattcgtgaagtgagtctgaatggcgaagcgtattttgaagttgcgaaagaccctgaacataaattcattgtttcgactccccaaaaatctaaagtggaagttttgggtacacactttaacctggaagcatttgatgagatggatgaggtgattaccactttggtagagggaaaggtcgaatttgtttatgagaaagacggacagggaagtaaaatactaatgcgtcccggacaaaaagtgatttataataataaggacggacagattctgtcatacaacaccaatggcgaatcggagcttgcctggatggaccaaaaggttatttttgataaaactccatttaaggcagcattgcatatactgaagaaacgctataatgtagattttattgtaaacacttcgaaatttgacaaatatacatttaccggagcgtttacagaacaatatatagaagagattctggagaattttaaaatatcctcacacatacgctggcgtaatgtgaaactgacaaataatcaaagtgaagaaaggaggcagattgaaatatattaaagcctttcatgtttaaccaataaaattataatacgtatgagaaacttccaaccgccttaaaaaaaagcatacaggcagatgttcccgcatccagcctgtatgagaaagcctttaacctgtttgaatacaaacagagaaaattatttcttaactttaattcatgcaaatatatgaagaaaaacaattatgtccaacaattgtgggcggataatcccgtttttattgtttggaaaaaaattcctttgtctatgaaactgctctttgttttctgtttttgttttgttgggcttctatgtgctaacgacagctacgcccaacgtactatgatctctgtgaaagcacaaaacttgactgtgaaagaagttctgtcacaaattgaggcacaatctgattttagctttttctacaatgaccatcatattgatgtagaccgccgggtatcggtagttaccgaacagagcaatatatttaccttattgaatgaagtgtttaaaaacaccaatgtcaaatatgccgtacgtaataaaaaaataatattatctacgcaaatagtggaagcgcctgccgcgaaacaaaccgtgcagataaagggaaaagtgacggatatgtttggcgatccggtcattggcgctaccgtaatggaagatggcacccagaatggtacaattacagacctggatgggaatttcatattgaatacagcatctgccaatgtaacgattacggtttcttacgtaggctatatgtcccagaccgtgaaggcacagcccggcaaaagtctgtcggtcatcctgaaagaggataccaagacactggacgaaatcgttgtcgtaggttttggtacacagaagaaagtcaacctgaccggttcggtatctacggtaaatgccgaggatttactgtcacgtccggtttctaatgtaagccaagcattacaaggattagttccgggaatgaatttttcttatgcttcggatggcaacggtggtgaaattggtgcagacatgaaagtgaatatccgtggagccggtacgatcggtgacggttccaatgcatctccgctgattctgatcgacggcatggaaggaaacatgaatatgctgaaccccaatgatattgaaagtatttcggtgttgaaggatgcggctgcctcttccatctatggttcccgtgcgccattcggcgtagtgttgataacgactaaaaaaggaaaagcggggaaagtcaacattaattataataatagtttccgctggtcagaagccattaatctgccggatgtagcagatgcctacacttatgccatgtacttcaacaaaatgcagttgaatgatggtaaaacagcggtacagtttgacgatacccgtcttcaggctatcaaagattacgcatcaggcacaattaccactactacccaaccgaacagaaatactcccactatctgggactggatcggtaatacgaatacagactggtatgacgtagttttcggaggtacggcattctcgcaggagcattctctcagcgtcagcggaggaacagaaaaaatacagtattatttctccggcaactatatgggacaggaaggaatgatggctatccgccgtgataaattacagcgttattcggtgagcagcaagattaacgcacagctttatccgtggctgaacatgaattacagcatgaaatatatgcggaaagattatagcaagcctaccgcgatgactgataataccttatatcagaatatagccaaacgctggccgatggaaccaactgtagaccccaacggttatccgatgggtaatacgattatccggccgattctctatggaggcgataacaattcgcagactgactggctataccaacagttccaggtggtgatagaaccgatcaaagactggaaaatcttcggagaaatcaattataaagtgatagatgccttcacccatacggattatttaaaggtgccgcagatgaatgtagccggcgaaccttattccggtgatacatggaaaacgtcgaaagttaccgaaggtgccgagcgtaccaattatttcaatgccaacgtctacagtgaatattacagatcatttgccgacgcacaccatctgaaagcaatggtcggttttcaggccgaagtaaataaatggcggcagttgcaggcgtccaagctggacttgatctcagaatccgtgcccagtattaatgccgctacgggtgaatcgactatcgataagtccaaactgacacattgggcaacagccggtttcttcggccgactcaattatgattataaagaacggtatctgctggaagtcaatctccggtatgacggtacttcacgttttgcaaaagacaaacgctggaatttgttcccttccttctctgccggatggaacgtagcccgtgaggcattcatggaacctaccagccatatcattaatacgttaaagatccgcggttcctggggagagctgggcaatcagaatacagaaaacctatatccgtatatccagttaatgaagtttgtcgcccaagatcccgactcccactggctgattaacaacagccgtcccaacacagcgaatgcaccggatttgatttcagcgctattaggatgggaaaccatgcggtcatggaacatcggttttgacctaggtatgctgaacaatcgtctgaccgtaagttttgactggttcaaccggaagactatcaatatggtaggaccagctcccgaacttcctgtaactttaggggcaaatgtacccaaaatgaacaatgcggatatgcagtctaccggttttgaattggatctaggatggcgggaccgcattaaagattttgactacggagtgcacctgttgctttcggacgaccgtcagaaaatcctcaaatacccaaacacgaccggtaaaataaacacgtggtatgtcggtaaatataatggagatatatggggattcggaaccattggcatagccaaaagccaggaagaaatggatgctcatcttgcttcactgcccaacggcggacaagatgcattaggagtcaaatggggcgcaggtgacatcatgtatcgggacctgaatggtgatggcaagatttccgatggagctacgcttaatgacccaggtgacaaaaaagtgattggcaatacttccccacgattccgttttggtctggatctgaatgcatcctggaagggcattgatgtacgcttattcttccaaggagtggcaaaacgcgatgcctggttgaacgacaacatgttctggggagctacaggagggatctggcaatcggcctgctttacttctcatcttgatttcttccgcgaagaaggggatgatttctggagcgctaacaaggacgcttatttcccgcgtatcttggttgataacttcgcaaaaaatcaaaagacgcaaacccgctatcttcagaatgccgcctatgtacggttgaagaatttgcagatcgggtataccatccccgcccagatcacacgcaaaataggtgtttccaacctgagagtcttcttctcgggagaaaacttattcacccttacgggattgcccggaggattcgacccggaaacaattaataccggttatggagcgaaagacggatcgaacagttcaggaaaaacttatccgttgtcccgtactttttccacaggatttagtgttaacttttaattgatgacgtatgaaaaagataattaaatatttatttttgctgacagggggaagctttatactcgcttcttgcaatgattttttggacagggaacctttagacagtgtgaccccggacaactttttctttactgaaaatgacttggctgcctatgctgtgaagcattacaacttcacgacgcatgagggatttaatgccggaatctggaaaaacgacaatgctacagataatcaagctgccactgactatgataagaaatggattcccggtcaatggaaagttccggaagcttatgataatccagcaagtaatgatccgtggtatttctctaccattcgtgaagctaattacttcctcgaaacagtagtgccccgcttcgaaaagggagagatagaaggttcggaaacaaacataaagcattatataggtgaaatgtatttcctgcgcgctaagaattatttgtcaaaactagagaccttcggtgacttcccgattataaaaaacacattgccggatgaaagtgaatctctgattcaggccagcaaacgggccccccgctataaagtagcacattttattctggaagatctggatcaggcaatcagtttgctaaccaataatatatccggtgggaagaaccgaattaccaaaaatgctgctctgttattgaaatccagagcagctctgtttgaagcttcctggctgacttatcacaaaggcactgctctagtaccgggtggtccgggatggccgggaaaggcagaagacattgcggactttaatatcgatacggaaatcgcattttttctgaaggaggccaaagcggcagccaaagaagtgataggcaatgcagccttggtacagaatacagcaaaagactgcatggatgaaacagttaaaacagacgaagacaaatataaaatgagcaacccctattttgctcagttctcagcgaacagcctggaaggatattcagaaatattaatgtggcgtgcgtataatctgcttgactataagattgtgcactcagctcctttctatattcgcgtaggtggaaataccggatttacccggcaatatgtagaaagtttcctttgccgtgacggtaagccgatctatgcaaccgaccagtataaaggtgacgaatcattattgaatgtacgcaaaaacagagatctacgtctacaactattcctgatgacaccgggtgagactctcagcccgaatgtgatgaatggtactcccgatttgctgccggaggttccacaacttctggatataacggaaaagagatgcgtaacaggctatcaggtacgtaaaggattatcaggaaactggtatcgggatggcaacacagcgattgaagggtgtccggtataccgtgcagccgaagcttatctcaattacatcgaggctgactgtatggaacataatggaacttccattggttcggaggcagcaggatattggggagatctccgcgaaagagccggattaccaagagactatacagtgaccgtgaacaataccgatctgtccaaagaactggactgggccatatattcggcaggtaaactagtctctcctctactatataacatccgccgtgaacggcgttgtgagctacttgcagaaggtttacgcatgttagacttaaaacgctggagagcactggaccaggttaaacaatttgtaatcgaaggagttaacttgtgggaatccgatttaaaggataaatacatgcaggacggaaaaaatcttctgatacaggaaggaacggaaggacaaacctccaatgtatcaagctatgttaatagcggtaaatatctttgtccttaccgttctgtgaagacaaataatctgatgtatgatgcaggatacacatggtgtgaagcgcattatctgaatcctatcgctatcacgcacttcagaattacggcctcaaatcctaacgatctgagtacttctattatttaccagaatccaggatggccaattcaagccaatgaaggcccgataggtattaaataaagatataggtcatttcggatatggtaaaaagtgtaggacgcaccgggctaatgtttaagaaaaaataaagctcagcgtcctatgcttcaaactattggaaaatttgtaccttggcgggacgaagttctaatgcaaaacaaaacagtctgacattaatatattaaagatagatcaatcaagcaaatctaagaattatgaaaagtacttcaacatggtggaaaatcttactcagtggtctgttattggctggaacactggtagctaacgccgacacttaccagccatcttactccacagcaggcttttatcagctttccaacacaggccgcacagtgtataacatgaatcctgcctggcgattttataaaggcaatatcgaaggagcggaatggccgagattcaatgataaagactggaacatcgtatcattacccgatggcatagaatatctccccaccgaggcaagcggatgcatcaattatcagggtgaaatctggtatcgcaagcatttcactcccgaggaaaactggaaaggaaaacaacaattcctccacttcgaagccattatgggaaaatcaaaaatatgggtgaatggaaagttgctgaaagagcatttcggtggttttctacctgtcatcgtagatgtcacttccagtctgaagtatggagaagacaatgttatcaccgtatgggcagacaacagtgacgatccctcctaccctcccggcaaaccgcaagatgcactggactttgcatattttggaggaatttaccgagattgctggatgatagttcacaacaaagtattcattaccgatccaaattatgagaacgagacagccggaggcggattgtttgtctctttcgacaaagtttccgagcaatccgcacagttgaaactggatgcacatatacgtaacacttccggaaaatccttcagtggtaaaataatctatgaactctatgaccgcgacgacaaacgtgttctctctaaggagaccggtttgtcggtaagcaaggatcttgcgaaacaaatttcttgcaaagtgaccgtagaaacacctcatttatggtcacccgacagcccctatctttacaaactacacatttatataaaagacaaagccggtaacaccatcgacggatattaccgccgtatcggcattcgcagcattgaatttaaaggaaaagacggattctggctaaatggcaaaccttacccctatcctctgatgggagccaaccgtcatcaagattttgcagtgattggcaacgccttacccaacagccttcattggcgggatgcgaagaagttgcgtgatgccggaatgcgtgttatccgtaacgcccattatccgcaagatccggcgtttatggatgcttgtgatgaattaggactgtttgttattgtcaacacaccgggatggcaattctggaatgatcagccgatatttgctcagagagtatatagtgatatccgcaatatggttcgccgcgaccgcaatcaccccagtgtatggatgtgggaaccgattctgaacgaaacatggtatccggctgactttgctaaaaatgtagtggacattctcaatgaagaatatccgtatccttattgctatgccggatgtgatgtaaccgcacgtggacacgaatactttccgatacacttcacccatccgatgaacggaggtggaggagcctttaataccgaaaatctggatccgaaaatcagttatttcacccgcgaatggggagataatgtggatgactggaactctcacaactcaccaagccgggtcaatcgtggctggggagaagtaccgatgctgattcaggcacagggatatgccaaaaacgattaccaactcaccagttatgatggactatacagaacttcaagacaacatatgggcggttgcctgtggcactcgttcgatcaccagagaggatatcatcctgacccgttttacggaggtatcatggatgccttccgacaacctaaactatcttattatatgttctgttcccagcgtcctgccgaacccaacaaagaattgatcgcagataatggaccgatgatttacatagccaatgccatgaccccattctctccgaaagatgtaacgatatatagcaactgtgacgaagttcgcctcacgtattgcaagggaggcaaagaatatacttatcataagccggcaaatgaaagcggaatgccctcacccgtcatcacattcaaggatgtatttgatgtcatgtatgataaaaagctgtcacgccaaaagaaacaggcagattcttaccttctggcagaaggattaatggacggaaaagtggttgcgacacataaagtaacacccacacgccgcccgtcaaaactgttgctttgggcagatgacgagaaaatacagatgaaagcggacggatcggacatcgtgacggtcattgcagccatcgcagatgaaaacggaaacatcaagcgtttgaataattatgaagtaaagttcgaaatcgaaggccagggccaactggttgccaatgaagaaacattcaccaatccacgtccggtactttggggaactgctccggtgctggtaaggtccaccactacaccgggagaaattaaaatccgtgcatcagtggtatggcaaggcaaacatacgccggttccggcagaactgattattcctacttttccatcagaacatacgctggtagcagacaaagatgaactgacacaagcacaatccgcaagcaaagatgccggaaataaaataaataccgctccatccgattgtgagaaacgtgtacttgaattacaacaggaactgaaccgcctgaaactgaaagaagtcgaaaaacaacagagtgactttgaataatgcgcatagttctatctataaacagaaaaaacacaaacttattaaaatacagttatgataaatagaatagtatatacttcatttttattaggagcgagtttcgccagtacagaagcacaggtaagtactcctcccaatattgtattgattttatgtgacgacatgggattctccgatctgggttgctacggaagtgaaatccagactcccaacatagaccgtctggcagaaaacggggtacgcttcagcctgttcaaaaatacaggaagaagctgccctagccgtgctgctttgctgacaggacattatcagcacgaagccggcatgggatggatgacggcagtagatgaacaccgccccggatacagaggacaaattacaaaaaacatccccaccattgccgaggtgatgaaagcgaatggctacagcacatatatgagcggtaaatggcacgtcacagtggacggagcttttgatactcccaatggcagctatccggcccaacggggatttgacaaatattacggttgcctgagcggaggaggcagttattataaaccaacaccggtatacagcaatctgacccgaatcaaagaattccccgatgactattactataccactgccatcaccgattccgccgtcagttttgtcaagcaacaccctacagacaaaccgatgtttatgtacgtagctcattatgcccctcacttacccctccaagctcctgccgatcgtgtagagaaatgcagagaccgatataaagtgggatatgacatgttgcgtaaacaacgtttcgacaggttaaaggagctgaagttcattttggacgaaatggattatcctgtctaccaaaaagaatttgacggaaaacgtccctcttgggaaacactcacaccaaagcaacaggagcaatggattaccgatatggcaacctatgccgccatgatcgaaattgtggatagcggaatcggtgaactggtggaaaccatcaaggagaaagggatgctggacaataccgtatttatcttcttaagcgataacggtgcaaccaaagaaggcggatacctgggccagcttatggctgatttgagcaatactccttatagaagctataagtcacaatgttttcagggaggcacaagtaccccttttatcttatcttatggcgatgccgaaaaaaacaagatgaaaggtcagatttgcaggcaacctgcccacattatagacatactgcctacctgcatggatattgccacagctacttatccgtcagaattcaaagagaatttgcccggcaagagcttactccctccaatccatggaaaaaagataaagcccagagaattatactttgagcatcaaagttcctgcgccattatttccaatcattggaaactggtacgcggcagccggaatgaaccatgggagctaatcgacttatcggcagatccgttcgaaaccaaggatttgtccgcccaatatccgaagctagtgaaaaaactagaggctaaatggaataaatgggcgaaacaatgtaatgtctttccactcgaaaacaaaccttggaccgaaagaattaactactatctgaaacaaaatccggatcaaagcggaatagaataaaatccgggaacaatagccttcttaatactaggtttagaaaaaagactgttccttttagacgaacagtcttttttctgtttacaagacatattgtttgtatatagctgtttttttattacttttgtgctttcagccccaaagagctgtaacacacttaaattcatgaaatatacttttatctaataataaacacgctacgacaatgagaaagaaacattcgctcctattttgtgccttatttacgatttttacgggacatgcagaagatacggattataccaaaggactttctatctggtttgattctcccaatacattacaaggaaaagaagtctggcatagttccaaacaggatgccagttgggaatcacagtcattgcctataggtaatggaagtatcggtgctaatattttgggttcaatagaggcggaacgcataacttttaatgagaaaacgctttggcgtggcggtcctaatacagccaaaggagcagattactattggaatgtgaacaaacagtccgcgtacatcctggacgaaatacgtaaagcgttcgtagaaggagaccagaaaaaagcggaaaaactgacacgcgagaatttcaacagtgaagtcccttatgaattttccagagaaaagcctttccggtttggtaacttcactacaatgggagaattctatgtagaaacaggattaagcacaataggtatgagtgactacaaacgtatcttatcattggattcggcaatggcggtggttcagttcaaaaaagatgacgtagcatatcagcgtaactattttatttcttaccctgccaatgtgatggtgatgcgtttcagtgccgaccaaccgggcaaacagaatctcactttcagatatgcccccaatccggtatctacaggacagttctctgccgacggtaataatggtcttgtttatacggcttctctggataataatggaatgaaatatgcagtccgtattcaggcaacagtaaaaggcggtaccttaaacaacacagatggacggattacagtgaaagaagctgatgaagtcgtattctatgtgactgcagataccgattataaaatgaatttcgcaccggactttaccgatcctaaaacatatgtcggtgttaatccgcttgaaacaacccagcaatggatgaaggatgccgtagccaaaggatatgccaacttactggacgaacactacaaagactacgcttctttgttcaaccgggtgaaactggagttgaatcctacagtgaaaacatccaatctgcccactgctcaacgactgaaaaactatcggaaaggacaacctgactactacttggagaaactctattaccagttcggacgctatctgttgatagccagttcccgaccgggaaatatgcctgccaatctgcaaggcatctggcataacaacatagacggcccctggcgtgtggattatcataataacattaatatccaaatgaactactggccagcctgctctacaaacctggatgaatgtatgcttccgttaatcgatttcatccgtaccttagtgaaaccgggagaaaagaccgctcagtcttattttggcgcaagaggatggacagcatctatttccgccaacatcttcggctttaccaccccattagaaagtcaggacatgtcctggaactttaatccgatggcaggcccctggctggcaactcacgtctgggaatattatgactataccaaagacctgaaattcctgaaagaaacaggatatgaactgattaagagcagtgccaactttactgttgactatctctggcataaaccggacggaacgtatacggctgccccctctacttcaccggaacacggccctatcgatcagggagctacatttgtgcatgcagttgtccgtgaaatcctgctggatgccatccaagcgagcaaagagttgggaatagacaaaaaagaacgcaaacaatgggaacatgtgcttgccaatctcgttccttataaaataggtcgttatggtcagttactggaatggtcaaccgatatcgacgatccgaaagacgaacatcgccatgtaaatcatctcttcggtctgcatcccggacacactgtttctcctatcactactcccgaactggcagaagctgccaaagttgtattggtgcatcgtggcgacggtgctaccggctggagtatgggatggaagttgaaccaatgggcacgcctgcaggatggaaatcacgcctataccctctttggtaatctgttgaaaaacggaacagtagataacctttgggatacacacccgccttttcaaatagatggaaacttcggtggcacagcaggtatcacagaaatgctgttgcagagccacatgggattcatccaactgctgcctgcattgccggatgcctggaaagacggttcgattcaaggtgtatgcgccaaaggaaatttcgagatagatatgatatggaaagacgggctcttgcaagaagccacccttctatccaaggcgggagaaaattgtaccgtaaaatatgccggtaaaacaatctctttcaagactgcaaaaggacgtagctatcaacttaaatatgacaaagagaatggattaacccaaatcagacaatagcactgaatctatttcattcagatgaacacatttacccccaatatcgaccatgaaaatttatacttgcctttgtttgcttttcttagccggatatctggttgcccagaataatacttcggctttgttgcccatgcccaatcagatcacaccggtaaaagggaaaccttttaccgtccgttccggaaagacggctatctatttgaatcagccggaattgcagtttacagcaaagacgctgcaaacgatattacaagacaggatgcaggcaaaggttccacttgcatccgaatccggccgtgcggacatccgtttgctggttgatcctgcaatggaaggaaaagagcattatcgtatcaaaataacctccaaagggatcactatcagcggagctaccgcaggagcggtctattatggagtcatgacgatggatcagcttctattaggtgacgcgtgcgccactgcacacaaggagatttctccaatccgcattgatgatgcaccccgcttccctcatcgggcattgatgctcgaccctgcccgtcatttccttccggtaaatgatgtgaagttcttcattgaccagatggcacgttacaaatacaacatactccagttgcacttgacagacgaccagggatggagagtcgaaataaaaaaacatcctaaattagtcggcaaagattattatacgcaagagcagcttgccgaaatcattcaatatgccgcccaacggaatatcgaagtcattcccgaactggatatccccggacatacagtagctatactagccgcctatcccgaattgggatgtacacacaccgatacgctacctaagatagtaggcaaaactacagatctaatgctttgcgcgaacaatgagaaagtgtattccgtatatcaggatatcatcaaagaaatatcttccttgttcccatccgattacatacatttaggaggcgacgaagctgtgatagaaaagaactggacccaatgtagccgttgtcaggccatgatgaaaaagctaggttatcagaaagcttcacagctcatgattccttttttcagccgtatgctttctttcgtccaagagaacaataagactcctatactttggtgcgaactggacaatatttatccgcctgccaacgactatctctttccttatcccaagaacgtaactttagtaagctggcgtggaggattgacacctacctgtcttgaacttacccgaaaacacggtaatccgcttatcatggcaccaggtgagtacgcttatctggattatccgcaactgaaaggagattttcccgagttcaacaattggggtatgcccgttactactttggaaaagtcgtatcaattcgacccgggatatggcgtgcctgccgaagatcaggctcatatcaccggagttatgggaactttatggggagaagcgatacgagacattaaccgggcaacttatatggcatatccccgcgctttcgcattggcagaagccggatggacacaaatgaaattccgtaattgggaatcattcaaacaacgtctctaccccaacctaactaatctgatgaagaaaggggtttcggtacgcgttccctttgaaatagctgacaagaaatagattcaaattagtttttgacaagtatcctttttgccatttctattcgttctttaaaatatgcgcaaacggtttcccagggataatagggaaaacgagaagttgcaatggggagtttcgcttctttttcattcaaaagaatcttaacccataccccacgggctttatcatggtagaaaatccattgtacattagcagccattggagatatctcataatctttccaatatcgggaaactgaatcaggattggaaatttgaacatccgtattctctatgcccatcaatgccacaaaagggatcaccgtttccgcatgagcaaaacgaaagttcgcagcattatcagacttgccttttattacttcatcagtagtataaatgaaatctgataacaaaggccatgaaatggcaacaggcaacatccttccgacaggtgcggagcttttactcatatattgtctcaaattctgagtttgccaatagctacgccattcttccattatgaaaaggtcgtctaaattcgtcaatagacctgtatcaggaagtatggcagctatggaaaacaaagccataacaacctcttccgcttcttcatcggtctctcgttccggttcaataaaaaatttcttcatgatagaagcagaagatattttattccgtacaaatgcttcatatatagaaagccaatcaccattattcttataatttacataagatttgtttaaatcaaaaaagcggagaatatcatcgtattgcctcccctcatttcgttgtatacgtaaagaaggattatcctgcatcaaacgagtaagaaatgcatccatactatttatacaccgaggaacataggttgctatagcctcgactttaaccgaattactgaataattgaggataatgtctcatcatacgtccggcaattcccttttgttccaactctcccaacactgacagttttccccactgtccctcaaaactatcagataaatgctgtaatgtagagagtaatattttcccatcagttgttagtctgttttcctgttgccccagtataagtgcttttttagccttatccagtgccttccctgaagttgggaaccgggctccatgtcttcccaaatggttgatataaaatggcaccatatcactagtagaaagatggaatgaatcttcctgaacaggatatagcattgctgttcctgcatattgttttattacatcctgtccccaaacactggaaatagagtaaaacataaaaatcccaattaacaataaccctttcatattataaatccattatatttataggctataacgatgagaacaatgattatgtttacccaaactcacacataaaaccctaagatttcagtttcaactgatcatttatgaacagtctctatatgaatagaaaaataaagttgtactatacacactttctattcttaaagagacaagcataccttaccagataaacaagtgaatatatataatttagggataaagcgttttttggaaccatttaaatagtagtataaaacggaaagcatactactattattaagttaatacacaaatagatacagatcattatattctcaacatattctcatgcctttgagaaaaaattctcaccacaatgagaaaaaatactcatgcctttgagaatattttctcattgcaatgagaaaaacttctcattgcggtgagaataaaagtcccttgtaggaatctgataatgattcactacttcacgttttatagatgctttaattcatgacggaataaagaaaaggataaactttcgatgctattacttgaatatttcaaataagttcttgtggaacttggttaactctgtcttttaataaatccaatactgtttgtattcaccaatatcttatttatgtctgtgcaaatataaaactattttttaaagaatgatataataaccccattttttctttattttcctcctaataaaatgtttttttcaacgaatactcatcaaaataatacaatttgagtctctatattagtactcaaaatataataaaagtcattctcattcataagcaactcatagactactatttagctattctccatataattatatcaagttccacaagaactataatctaatttgtattttttatagaaacaaaacagcacagttcggcattgcagaaaaaaaagatataatatgttagccttttagtataaataaaataacaataatgcctatggagaaataaatattaaactatttaatgtacacacaacattacaaaaaattcatgattaaaattaatcatgtatacaacgaagcgaaatcctatatcaaggaaaacacaatgaaagattgcctatatactataaaattaggcaatcatatagataaccttaataattcatctaaaatcagattcatgtaaaatacatcttagaaaagccgatcagagatttaccaattaagagttctctacacctctaaggaaaacagggttactcaaatctctcctcaacaaaaagcagtaaagtcataaaactgaattcagaaaacacacgatattcagtagtttctcggcaatatcggaaggaaacctttccttattttgtccgaatcttaaaagaattaagttattgttattttcaacaagctctcttcaagtaaggagcacaatttatttacgtatgaaaacaaagacttctgtgccgtttagtataaaaaaagaaatacgactttttttaattatcctctttattcctttttatgcatgtgaaaatattgatgatacaataccagctgatagcataacaacaacccgttcttatggtcagtatactgacgagcagtggaaaatagtgaaactaatgcccaatatagaaagcataaaatggacagagcctaccttcagtgaaaaactgccaaatttgattatggaagtaaaacctgcaccagcttgccaagaatttatgtcaaatggttgtaaatgttttattgaagtaggagtttcaaactatttcaatcctgacgatcctttcttggaatatacccccattgtccaaagagaattgtataattctgaagtaggttatacagatcaaactattacattaacaatacctgcaactaaattaggagaaagtagttacatcgctgtacgtagcatatttacaaaagacggggagcctcactatggagcaattaaaacagagcaaattcaaagcctatggagtccctatgcatcaatgacgggattcgataagcgttttccaagacctgaatatagcgacaaagtccctatatctatatttttaactgttaactttattccctcaccaactagtaaatgttgctactttttcattggtagagatactcaacctattgcttcagcaacatacgaaggggggtcagatgtcacaacaaaatatgtatcgattgattgttatccaaatgacaaagctgaattactttatcagattggttctatgattccgacagtcttttatgaagcaccttataaaatgaatcttataaggttactatttacggtccctgttattgatttatagtatcataagattaactattaacatcaattattatacaatagcacaccgctatatataacccgagtgaaacatacataatatcaacactaaaatatcatttatgaaacagacataaggtttatttcgtccaagggaatggaaactaatagttattggttatcacacaagattgaaaactattaatacaacaaccttttatataccatctccccgggttgtggaaccaatgtacacaaggacgcagtaccaaccacaattagtggaaaagttctctaaactgaaacccgcagttacaagactttcagtagttctttggcaaaattgaaagaatggttattatccaatgttactctccatataactatgaggtagaaataagcaggagacagataataaccgaacgtactttgtatttatacaagtacgttctttcgttttgtccgaactctaaaattgaattatcaacaatttaaccaagttccctcccaaaagggagcgtaatcgattgaatgcatgaaaaagaaaatcacacaaacgttactgccaatcattataggcttacttacaatgatgcagtttgcctgttctgatgacaataaatcaggcggaagtggcaatggtcctttaaaattaactactttttatccggattccgggtacttatcctctaaaataataatagaaggagaaaatatgggaacagatgcttccaaattatctgtttacttcaacaaaaagaaaggattcgtttcacaagcagcaggaaatatcttaatggtctatgctcccaaattaccgggagacatttgcgatatatctgtagtgaaaggaacagattctctcacgtttgacaataagttccgttatatctcccgatttacggtagaaaatatatgtggtaaggaaggaagtggattgagcgttggaggagatcttgctagtactacttttgagaattggaaattaaaagtaggatgttgtgatccggaaggtaattactatgcctgttattctaattttggtggcaacacaggtggtctggcattaatcagcgaaaaaaacaacctatcaaagcacatcacaaaaattattgtaaatgatgtgttataccacaatgaaactggaaaaatatatgccttagccacaaaaagaaatattatctatgaaatagacccgaataatgactggaaagcgaaagcccgctatttaaaactacctgacccacccgcaaaacaggtcgattatgacagggctgcatgtatagcttattgtcctgctaatggttacttttatgcacgtacaggaactcagcagcttttccgattcaagctcgaagacatgatatgcgaatatgttaaagatgataaatacaatggtgcccagacttcagaagaaaatcattttatcctcagtatgatgtttgatccgacggatccaacccaattatatacttcatacggatccgcctcctgcatcactgtacaggatgtatcaaagccagagtcggaagaagtagtatatgccggcaacttcaatgtgagggctgatggagacgctactcaagtaatcaacggatatcgcacggattgtctattctcttggaataaccagatgagcattgtttctgatgatagcggtcagaaaattatgtatgttgcagactccggtacccagaccatacgaaaaattgatatgatatcaggaatggttactattgctgtaggaagacaaaaagttcaaggcaaccaaagtggcaccccattagaagcaactttcaactggccgaaaggagtcggtttaactcccgaaggagatttatacatttcagacagtggttcaggatgtatccgtaaactaagtctgcgttaaccttaataatcatctgaaaagaatatactaatgaaaaaatatatactatttttattcttgttcttctgtatagcacctacattgatgggacaggagaagcagtttaccatatcagggcatgtatttgacgaaataaaagagccaataccgggtgtcagtgtatatctgaaagaccgtgccggagtgggtaccagcacgaatatcgatggagcattcaaactaactgcccatgcgggagatgttgtcacattttcatttatcggttttaaaaagatcgaacatctcgttttaaaggacgaacttgatctgaaaatcaatatgaaaagtgattcgcaacaaatggacgaagtcgttatcaccggtatgggtaccaaagaaaagaaagtcaatctaaccggagctgtcactaatgtagatatctcacaaatccagactcctgctacttcccttaccaatatgctcggtggccgtgtccccggtattatctccgtacagtcaagcggcgaaccgggatctaatatgtcggagttttggattcgtggtatcggcacatttggtgcaagttcaagcgcactcgtacttattgacggtcttgaaggtaatctggacagtatcgatcctgccgatatcgaaagtttctcagtacttaaggatgcttctgcaacagctgtatacggtgtacgcggtgccaatggagttgttttggtcaccaccaaacgtggatcaaccaacaaaatgcagatagatgttcgtgctaatgtgaagatttcatatcttaccaagcttcccgaatatttacgtgcatacgattacgcacaattagctaatgaagcaagcgtatccagaggtgcacagcccatatatgatgatatcgagatgaaggcaatccaataccacttagatcccgacttctatccagatgtagattggcaaagtgaaattctgaaaaacacatcaatccaacagacatactatgccagtgccagaggtggcggtagtatcgcccgttattttgtcagcatgaatatgtcgaacgaatcggcaatttataaacaagacaaagacagtaaatatattaaggatgtacattacaacacttacggaatgcgtctgaatgtagactttgacttatctaaaacaaccaacctctattttggttcggatatctatctgacctcacaaagcctgcccggtcagggagctacaaccaaagcattgtggaatgctcaagccatgctgactccgctgaccatcccagtccggtattctacaggtcaaatcccaacttataaatccggagcagcagatgtgttctcaccatacgctacgctaaattacacaggtctaaaaaatataaacacctatgccggcacctatacaattcgcctgcaacaggatctcgattttcttgtaaaagatctgaatcttgatatccagggagcttatagcaatagttcctattttgaagaaacccgtagcgtcatgcctgacatgtattgggctgaacgcagagatgaagacggaaatcttgaacttgtacataccataaagaaaaaaggaacaacttataccaaagacagagatagtcaataccgaaaatacttcctacaagctaatctgacgtggaaatgtatgttgaatgaacaacaccgtatttctgctctggcacattacgaaatgagcgatagtaaacaaacgaaagatttgaaatcagatggaatggcggctatcccacttagatatcaaggactatccggaaaagtcagttacggattcagggatacttatctactggactttaacatgggatacaccggttccgaaaatttccaaaaaggcagacgttttgggttcttccctgcaatttcaggcggatgggttcctactcaatacgaatttgtacaaaaggctctgccttggctgagttttcttaaaatcagagcttcatatggtattgttggtaatgatcgtatttcaaccaaacgtttcccttatctgaccatcatcaacgaaaatgccgaggcgggatggggatacaataataaaggtatttctgaaaatcaaatgggagccgacaatctgagatgggaaaaagctaaaaaaatggatattggtattgaaggcgaattattcaatagtaaactaagttttgttatcgatttcttcaaagatacccgtgatggtatattccaacaacgccgccaagttccgtcctatgtcggcctcatcaacatgccatttggtaacgtaggcagtatgaaaagttatggttcggatggtaacatcacctatattcaagattttggcaaagatatgacattgacattccgtggcaactttaccctcagcaacaataaggtgaactattttgaagaagaagataacaaatacgaatataactcggctaccggacgtccatacggatatcagaaaggattaattgcattaggattgtttaaagatgatgaagatatcgccaacagtcccaaacaaacttttggcagctatatgcctggagatatcaaatacaaagatgtcaatggggatggtcttatcaatggggatgaccaagttccactatcatacagcagaactcctcgtttcatgtatggattcggtctcgaattcagatataaaaaactatccgtagccgtattatttaaaggcaccggaaatactgatgtttatcacgtaggtgtaccagacgaatatggagttatatacgacgcaggctacatcccattctatgacaaacagattggtaatgttttgagtatagtaaaagatccagccaaccgatggatttcccgcgaatatgccgagaaaataggtttagatccatctttggcagaaaacccaaatgcacgtttcccacgtctatcctatggaaacttagctaataattctcaagtatcgagtttttggaaagataatgcaaaatatctgagactatcggaagtaaatatcaactatagtctgaatgtacccaaggtaataaaaaacctaggaattagctctatcgacctttcattagtaggtacaaatctctgtgtatgggataaaattaaaatcagtgatccggaacaagcactctataacggtcgaatctatccgatacctgcaaatgtaactttacaagcctacatcaaattctaaatttcaaaaacataattatatgagaaaattaatattaaactcaatactattgttgattattataagtatctcctcttgcaactatctggatgtagataaatggtttgacgatacaatgaaatatgacacaatcttttcccgtaaagagtatctagagagatatatgtggaacatcgctgctcagttccctgctgaagacgcccttcttgctagtccatatacccccggtcctttagctaccgacgaagcgtttgcacccttcgcttcaggtacatatctaggtacagcaatggtcattggagaaataaatgaagaaaacatcagtagcaaatcaatctattcgtggaattccatgtacaaaataatccgcaaaactaacgttatcctgtcacgaatggatgaagtaaaggaccttactaatttggacaaatcagatatatgggcatatacttattttatgagggcatatgcatactatcatctcatcatggatttcggaccagtcatcctcgtaggtgatgaagtatatccatccaatgagcaacctgaggcttacgcaaatatacgttcgacgtatgacgaatgtatagattacgcttgcgaacagtttgaaacagctgcttcatatctcccggaaacccagccaaccagttctttcggacgtcctacaaaaggagcagcttacggattaatcgcacgactaagattgatacaagccagcccattgttcaacggtaaagggcaaacctattttgggaaatggaaacgtacaaaagacggagtattttacatttcccaacaatatgatgaccgtaaatgggcagtagctgcagcagcctgtgaaagagtaatggatatgggactttatgagctacacactgtaccggcagacaaagactcctatattcctcctaccaacgagaatcaaactttccccaatggagtcggaggcatcgatccatttaaatcttatagttatatgttcaacggtgaaacagacggtagaaaaaacaaagagtatatatggggaagaactgccagaaatattatgctccgggaatcttttccgcaatcaatggatggatataacggaatgggtgtaactcagaaaatcatcaatatgtactatatgaatgatggaactgataattggccggaagacgcaaaaccctacaatgaagatggcaaatataatgaaactaacttcagcacagaggatgaaaccttttccgaatatactctaaaatccggagtcttcaacatgtatcggaatcgtgagatgagattctatgccagtatcggcttctccggacgtttctggagggccagatcatacagcgggacagatggtaaaaaagaaaagatgatcaaatatgacgcttcctccataacagatggcaaacactcttccagtggtaacaaaaatgactatcctgctaccggttatgtaatcactaaatatatccatgacgacgattcatattcttctcctagtggagtgatatctgagaaattcttccctattatccgctatgcagaaatcctgttagcctatagcgaagcacttaataatcttcaaggttctcattcaatagaactgacaatgccaaacggagaaacaaaaacatataccgaaaaccgggatctgaataaaatcaaaagagcatttaaccaaatcagatatcgtgtaggtcttcctggagtaaagaatagcgacctttccagcgtggataattttaataaaattattcaaagagaaagagctattgaattcttatatgaaaatcaaagatactatgacgtacgtcgatggggtatttatgaagagagtgaaaaagaagtaatccaaggaatggaccttagcaaagatgaaatgaacggctatttttacagcgtagcggtagaccatacatgggtgagacacagaatagtcgaccgtaaaatgatattcctaccaatccataaagcggaaatacgaaaagtacaaggtttggaccagaaccccggttggggcgactaatgtaacaatcccaaaataaacgctaatgttgaatcaaactaaataataagaatgaaaacatataaaataagcatcgtgtcaattctcattctgctagttctagccggatgcagtgacagaaagaaatacttcgaagatgagcgatacgaaaaaatggtatacattgtaagtgacaaggacaatatacacaaccttgtttacgatttggatggtaaagataataacatacgttatttatcaatagcttgtagcggtaccaatcctacagaagaagaagcaactataacgcttacagaagacactgtccttctagacgaatacaattatacgaacttcgtagaggataaaagccgttatgctatcaagatgaatgcagaggattttaaaatagaaagcaacaatatcaaatattcgataggacagccatatacattggtccctatcaatatagatatgtcagttattgaaagtctgaatcccgataaaacctactttatacctatagccataaaggatgcaactccttaccctgtggtaaaaaagaaaggaaatgtgctactgcaaatacataggaaaaacaaatataccagtacagcagaccccgtcagctataatgcgtcaggttatgaaggcaatggctactttctaatttctaaaacgatggttcctctaactaaaaatcaagtaagagttaatattgggaccaaaagactcccggcagaaccggagaatcagccggacttcatcaagaaaaatacagtgattatcgaagtagcagatgacaactccctgaccgtggaaccttatgatcctgaagaaatggaagtggaaacagtggatgtcaaagtagcccatccgggtgataacgcctatgcactctacaacaaccggctcgacccgacaactacgaccttctgtgtatgctataagtatagactcaaaactggtagttggaccgaagtgcgggaagcaatacgcttaccggtgattgttatagagtaaacaagccaaataaagacctattaatataaatcgggaataaccatccgaatcaaaagaagttattgcaaaagtctgtaagctctcctcccccctcctccttttttaaggagaagggagagctgaagacccgaagagcagataaagcacaaaccattattatattcatcctgccaatacctttttaacaataaggcagagaaataaaaagcaattatggaataaacacaaaaagtccctgcaaagcattactttacagggacttactattcttttttcagcggagagacaggctctcgaacttatactttcacagaatatcataaaactgcaaacgactgataatcaagtgtaaattacaatatagagtaaaagtaaatgtttctaaatgtcttttgctatctcaataattgggtgtatatttgggtgtagaatttcaaacgcacccaattatgaatatcaagcgcaacatcatttttgcattggagagccggaaaaagaacggtgtgccaatcgtagagaacgtacccatccgtatgcgtgtcatctttgccagccaacgcatcgagtttacaacgggctaccggattgacgtagccaaatgggatgcagataagcagcgggtaaagaacggatgtaccaacaagctaaagcaaagtgcagccgaaatcaatacggacttgctgaaatactatgccgaaatccagaatattttcaaggaatttgaggtgcaggaggtcatgccaacgacccaacagttgaaggaagctttcaacatgagaatgaaagacaccagcgaagaacagccggaagaagcccctgtcagcttttgggaggtgttcgatgagtttgtaaaagagtgcggtaaccagaataactggacggcatccacctatgaaaaatttgcagcagtgaggaaccacctcaaagagttcaaggaggatgcaacgttcaactatttcaacgagtttggattgaacgaatacgtcaacttcctgcgtgacaccaaggatatgagaaacagcaccatcggcaagcaaatgggattcctcaaatggttcctgcgctggagcttcaagaaaggacatcatcagaacattgcatacgatacgttcaaaccgaaactgaaaaccacctcgaaaaaagtaatcttcctgacttgggatgaactgaacaagctgaaagactaccagatacccaaggataagcaatacctggaacgtgtgcgtgatgttttcctgttctgctgctttacgagtttgcggtattcggatgttcgcaatctgaaaagaagcgatgtgaagtccgaccacatcgaaataaccacagtcaagactgccgacagcctgacgattgaactgaacaaatacagcaaagccatactggacaaatacaaggacatccatttcgagaattacatggctctgcccgtcatcagcaaccagaagatgaacgattacctgaaagagctgggcgaactggcagaaatcaacgagcctgtacgggaaacctactacaagggaaatgaacgtattgatgaagtcacacccaaatacgctttgctcagtacccatgcaggaagaaggacattcatctgcaatgcgctggctctcggaatcccggcacaggtggtcatgaaatggacgggacacagcgactacaaagctatgaaaccctacattgacatagcggatgatattaaggcaaatgccatgaacaagtttaatcaactataaaagtatcaaacagtttcatagatagttaccaatgactatatttgtagaaattatcatcacaatatgagcaacaaggaatccaacatagagaaaacgaattttgatgcattcatacaagcggtcggttcggaaatagaacaggcacaagtaaggctgattgttgcagccaatgcacaaatgctgttccattactggaagataggcaattacatcctttatcaccagcagctgcacggatggggaagcaaaatcatcaagcagttggcaaaggctatccgactgcattaccctgaaaagaaaggctattcggaacgtaaccttacctatatgtgccagtttgcaaaagcatatcctttaagagcgttgcaaagtttcatagaaacagatgcaagcctgtctgtcccaaccatacagagtgtgaccaatgaagtattaaaactgaatgacaagcaatttacgcaggaacttactgcgcaaatgcaatcgattgattgtcaatcattagcaattacgcaggaagttcctgcgcaatttgaagatgtgggaaaaaccgtgtctgccatttacaggatgggaatcagggaaatagaagaagttttcttgacctctcctatagccaaaataaactggacaagccaaatgactatacttgacagttcgctacctttaggtctaagctactggtacatgaagcagtctgtggaaatgggatggagcagcaatgtattgaaaatgcaaattgacagtgatttgtatagccgacaaatcagcaacaacaaggtaaacaatttcacgaccacacttccggctccacaaagcgaccttgccaattacctactcaaagacccgtacatctttgatttggcaggagccaaagaaaaagcagacgaaagggatattgaagaacagctggtgaaacacgttacccgctacctgttggaaatgggcaacggttttgccttcgttgcccggcagaagcacttccaagtcggaaacagcgatttctttgccgacctgattctatattccattccgttgcacgcatatatcgtggtagaattaaaggctaccccattcaaaccggagtatgcaggacaactgaacttctacatcaatgtggtggatgataaactgaggggagagaatgacaacaagactatcgggttgttgctatgcaagggaaaagacgaagttgtggcacaatacgcattgacaggctatgaccagcccatcggcatcagcgattaccaattgagcaaagcgattcccgagaaactgaaatcagcgttgcccagcgtggaagaagtggaagaagaactggcctctttccttgacaaagacaataacactcaaaaatagttgcgtccatgaaagatgtaattacaacgctgattccccgatacggagaattgaacagaatatataaagactggtttgataataaaggtttctcttttgaaaagcagaaattcattaccaagttctatctggactacaatgatgtaacggttcttgaaacagccattcttgaactggtgtttcatcttccacaggagcaatacacactgattctgaatagcctgaaaaaggaagtatgcgaaaacataagttattacaagaaaggatgtatgccggatgaacagaccgtttacaatatctgcttccgagtttcagaaatctataaagaagccatagaagaacagcaatacaagacgaccaagctccatgctccgctaaacgaagcataccaccgatacgattccataggttatcgggaacacactgcagaggatgaaaagcgtgcggaaatggaatatgaacggtgcaaagatgaatacgaggagaaaaaaaacaagctgaccgaactctacgatctgcaaaaacagaccagagagaaagccctgcaatatgcaaaaagccgtttcaatgaaatctatcggctgggctgccacctcaaagagacattggcgaaatatgtatttgatgaaacaaacgagccggaagagccagccgaacaagaaccaaatgcccccaacatacaggaagaagtgctgggaacgaaacagactgagtatttcaatatggaactgctttcgctcattcatgtaacctgcgtgggagaacagttcgagaatatttccgaacatgatttctatacctgcatgaacctgctaccaagcgacaccaaaccccaaatcagaccgagagaaaaaatacgtacctgctatctgatattcctgatgagcgaaaaactgcccaaacaggacagggagaattggaagaggaatatcctgaaaatattggatattgaggaaagctactacaagtcaaagtacaaagagcctgtttccgatttccccagtgacagcaaccggaaatttgccaaagaaatggatggtatattccgataatctgtgatatgccctgacattttacgaaacaaccacttttaccactcaaattaaatttttgagtggtatttttattatctgatattcagataaataacaagatattccatttatatcaaccacatccttaccacttacaaccctacctaattttgcatcgttcgagaacagagataacagccagtgcgcagggctgattgttaaacgactaaatagattgaacgatgaaaaatcttcaagaattattatcaaaacccgtctggcagatgacaggtgaagagttcatattcctaagtaagcacgcttcccgtcaaacggaaacgcagccacagcccattacagacacagaaagaaaatatgtgtacggaatactgggcatagccaaactgttcgggtgcagcctacccaccgccaaccgtatcaagaaaagcggaaagattgacaaggcaatcactcagataggacgtaagattatcgtggatgttgagcttgcccttgaactggctggaaagaaaacaggaggacggaaataacgggaggcatggctatggactatatgaaagagactaaggaaatatcggctgaagaagccataatcctttggcaagcctcacgtttgagcctgtcgaaaagttatgagaaagcacctgaaatccttaaagtacatgattctgtcattgggacattgggtaatttcagcgcatccatcggcaaagccaaaagtaaaaaaacgttcaatgtatcggctatcgtagccgctgcattgaagaacggcacagtgctgcggtatgtggctgaactgcctgaagataagcggaaagtgctttatgttgatacagagcaaagcccttaccattgtctgaaagtcatgacgcgcattttgcgaatggctggtttgccagatgatagggacaatgagaatcttgaatttcttgccttaagaaaatacacgcctgagcagcgtatcaggattgtggaacaggctatttacaatacacccgaaatcggtcttgtaattatagacggcatacgggatatggtgtatgacatcaacagccccagtgaatcaacacgcatcatatccaagctgatgcagtggacggacgacaggcagatacatatccatacgatactgcatcagaacaaaggggatgagaacgcaagagggcacattggtacggagttgaacaacaaggcggaaaccgtattgcaggtagaaaaggacaagggcaacggtgacatcagccatgtttcagccattcacatccgggcaatggactttgagcctttcgcattccgtatcaacgacaaagcccttcccgaactcattgagggatacaaacctgaaacaaagaagccgggaagacccgaagaagagaagttcgacccttacaggcatatcaccgagcagcagcaccgtatcgcattggaagccgttttcgggctgaaagaggaatacggctacaaggaactggaagatgccttaatcaagacctatatgtcagtgggtgtaaagctgaaccataaaaaggcggtatcgctcatcaccatgctccgcaacaaacggatgatagtgcaggagacaggcagaaaatacacattcatgcctgacttccactattagcccatttccctgcaatcacttcactttattctcggggtgtatatattaggaatatagtgaagtgcttggggaatgggactaaatcacttcactttattaccgtatcctatatatacgagaatttagtgaagtgattatagaccgtacttcctaaaaaggtacgggcaaaaagaaaaataaaccaattcaccaactactaaaacaatcattttatggatatacagacagccaagcaaatcagaatagcggattatctgcatagtttaggatattctcccgtcaagcaacaaggtgtcaatctgtggtataaatcaccgttaagggaagaagccgaagcctcgttcaaggtaaataccgaacgtgaacaatggtatgacttcggtttgggtaaaggtggtggtatcatagaactggctgcacacctgtacgctaccgaccatgtaccttacatcttgaaacggatagcagagcagacaccgcacgtgcgcccggtatctttctcttttggaaagcaaaactcttccgagccgagcttccaacagttggagattgttccgctgtcatctactgccctgcttgcctacttacaaggtagaggaattaacataaaactggcgaaaagagaatgtagtgaagcacgtttcactcacaactgcaagcggtactttgccatcgcctttcccaatggttcgtgtggatatgaaatccgcaaccgctatttcaagggctgcatcgccccaaaggaaatctcccacatcaggcagtcgggaaaagcgaggaatacctgttatgtgttcgagggatttatggactacctctcctttttgacattgagacaagagagctgcccaaattatccggaattggacgggcaggactacattgtattgaactccgtatcgaatgtaaacaaggctctctatccgttgggcaattacgaacgcatccactgctttttcgacaacgaccatgcaggactggaagcactccggcaaatccgcatggaatacggcagagagcggtacctccgggacgcttcgcagatttacagaggatgcaaggacttgaacgaatacttacagaaacagattgaaagaaaaaggcagctccagtccgccaaaggggtgcgcagccaatcaccggaaaagaagaacggcttccagttatagcccactataactacacgcttcgctttcgtagttgtgggctctcccgaggggattagggctttgccctaatgacccactcagggcgtttcacccctgagaaccccgagcaaagagtgaccctctctttgcaatctccgcttatgggttacccctaagaacccctctgcgaaagcgagcaaagtaaatcaattgtaaacaaaggaaagaagctatggcaacaaaatcaagcatacatatcaagccttgcaacatcgcatcgagcgaggcacacaaccgaaggactgccgagtatatgcgtaatatcggggagtccagaatctatgtcgttcccgaactttccaccgataacgaacagtggataaatcccgacttcggcactcccgaactgcgaactcattatgacaatatcaagcaaatggtcaaggaaaagaccggacgtgccatgcaggaaaaggaaagggaacgcaagggaaagaatggaaagattatcaaggtggcgggatgctcacccatccgtgaaggagtattgcttatcagaccggacaccacactggctgatgtacgcaaattcggtgaagagtgccaaagacgctggggcatcactccgctacagattttcctgcataaagacgaagggcattggctgaacggtcagccggaagcagaagacaaggagagcttccaagtcggtaacagatggttcaaaccaaattatcatgctcatgtcgtattcgactggatgaaccatgaaactggaaagagccgaaagctcaatgacgaggatatggcaaccatgcagacccttgcttccgatattctcctgatggaacgtggacaggcaaaagctgtcacaggtaaagagcatctggaacgaaatgatttcatcattgagaagcagaaagccgaactgcaacgtatagaggaaaccaagcgacacaaggaacaacaagtaagccttgccgaacaggaactcaaacaggtaaaagcagagatacgcacggacaaactaaagaaaacagccaccaatgctgctaccgccatagcaagcggtgtaggttctcttttcggaagcggtaagctgaaagaactggaacatcacatcgagcagctacatcaggaaattaccaaacgggacaaagctactgatgaattaaaaattcagatacaacaaatacaggaacagcatagcagacaaattcgtaatcttcaaagaatacataatcaagaacttgaagccaaagacaaggaaatatcacgattgagcaccttgcttgaaaaagcccacaaatggtttcccatgttcaaagagatgttgagaatggaaaaattatgcgctgttatcgggtttaccaaagacatgatagaaaacctcttgacaaagaaagaatccatacaatgtagtggcaaaatttattccgaagaacacaggtggaaatttgacatcaagaatgatatttttagggttgagaaacatccgatggatagtggtaagcttatgctgaccataaaccgacaacccatagtacaatggtttaaggaacaatgggaaaagttacagcagaatctacgtaactcggtgcagagagagcaaaaatccagaggatttagaatatagaatagcctattattaataaaatcaagtatctatgcatccaaacagattgtttttattacagaatcaaaatcctaagaatttataaaaaatgaagcctaaagaagttttggaaaaatggatagattgctttaacaaagcagatgcttatcatatagcagagctgtatgctactaatgcagtaaatcatcaagtcgcaaacgaaccaataataggtaaagaatcaatctacaaaatgtttgtgaatgaatttgccactgctaaaatggtttgtatggtggaaaatatttttgaagatggcgaatgggctatcatggaatggaaagactctcttggacttcgtggatgcggattttttcatgtaaaagataacaaaatcgtctttcaaagagggtattgggataaactttcattcttgaagcaacacaatcttccaattgaataagtactatcagaatacggactgggaaattgaaatacccagtccgagttatataatgaattttacttgttaaactatttaaagtcagttggataacaaaccatacctttcacattctcagtagctccaggtattaattcagccaccatgcaatattcatgagagacttcgaaaggaaattcaattcctaaatcgatagccttgcgatagccaaatcgaggataatactctttatgccccaatacgactgctgtgccgtaacccaaaagtgctgccctctgatgggcttactgaatcaacatcccccccaattcccttacgctggaattccggcaagactgccaatggagctacactcagggatgtgacagactgggtgtcactgtctatctttacttctgtaagtaagatataccagacaatttgtttttctgtcattttcttgttcttatctaattgttaggctcattgttgttatacattgtttaattatagataaatcgtgaatatccttctctcttaaatcgtagcccgaatggaatacttgttgcccttttgcagaaatgcaagggatgcttctgccttcaaagactgctgttccaaaatagtccggttgaaattcataccagcctccatccaagtcggcttgtttggaagtgccgtccgcattcaagacaaaaggatggatatcaatatagcctaattctttgctatacagttccatacgggtgggcaaccaatttgtttcaatttgatatcctctctcctgcaaaagatcaaggagttggtctgtataattggcatcaaaatcaatgtcaatatctctatgcaagcgggtttgctgtccgtacaagacatccactccccagcctccatccaaccaaaactgcatgtccaggctttccaacaagtccaaaacttgaaataactctgtaatcgtagtgtgttctttctttgtcatataataattctttaataaataatactatgcgtaattatccaactgcttgattgaagaaataaaatttgcacccactccaatcagaaagataacccatccgctgatcataaagacggatgtgataccccatgcttccacccaatatcctgaagctacgatacccagcattgatggaaaggtactcaaactaaagatgagagaaaaagtccgtccaagcatgtccgaagccaagttctgctgaataatagcgatgaaaagcgcatggtaaatggaataggctatgcctcctgtaaatgttaggcaaacaaaacctataaatgcgcttgatggtaaataactggcgctaatcagatacaatcccaatatcacataagccgtatgcatcactaatgtttgcttgcttttcaaagccttacaggcaagtactaaaccgcccaacaatgcccctgagccccaacccatttccacaactcccatttgcaaaatgtttccgttgaaatgcagaagcgtcataaaaggaaataacgtaaaaacaggcataaggacaaaagtcaccagcgtaaagcatacgaataaaggcaaaatgcccattgtacgccgcaaggtatgccaacattccgtcagttcttttttgaaatctggaagaactttcgttttttgaagagaaggaatctggacacaaagtaaggtcagacaagcagcaacagctccgatcacatctatgagcagaatatactgtatgggaagccaaacaacgaggcttgcccctacaacgggagctatcacctcactgaaggattgaatggaatggtacaaacctgataccctgacaagatggtgcttgggaaccagtagagggatgcttgcctgtaaagcaggtgcatgaaacgtactgcctattgaacgacaagcagtcaatagataaaaaaaagaaaggtctttataacccttggttatcacaataaaaagacatagggtacagaacgcgatgaacaagtccgaataaaacatcgttttctttcgattccatctgtcaacatagaccccggcaaacaagcctaatacaaattgtggtaaaaatccagctaaaatagccagagataaggctgtcggggatttaaattcgttgctaatccaaaaaataatggagaagccaacaatcgtacttgttaaaatagatatgagttggcctattcctatcacggccaaagttgatttccaatgattcattgtgctaatatttcatgcgtttatagataagtactttcgtacattaagcaaaacgaaattctatccacacaaaaaacttgtattataatccactcctgacgttggaatacaataacaaatactttcaggacgatgtaaagtcctgaaaaatcaaactgaatggatagataaatattagtcttttctcatcggattcttttaatatcgctactcttttattatgtagtggttgtattatcttaaataaaacaaaaacacccgactttacattcttgggtgtaaaactgggtgtttgttttgcaatttgctgattttcagcgtttgttgcggagagacagggattcgaaccccgggtacctcgcggtacaacggttttcaagaccgccgcaatcgaccactctgccacctctccaaaactcctttatcagaagtgctttccgttgaaagcggtgcaaaggtacgaatcatttttaaatctgcaaacaatctgacatttttttcacgaaataatcgtatttttgcagcctataataagtataaagacatgatatatcctcaaaattttgagcaaaagataggattcgaccaaataaggcagttactgaaagacaagtgtctcagcactttaggcgaagaacgggtttcagacatgagcttttccgagcaatttgaagaagtggaagagaaactgaaccaggtaactgaatttgtgcgcatcattcaggaagaagacggatttcccgatcaattcttcttcgatgtccgtccatcactaaaacgggtacggatagaaggtatgtatttggacgaacaagaactgtttgacctacgccgttcattagagactattcgtgatatcgtacgttttctacaccggaatgaagaagaggaggaaaacgatgtaccctaccccagcctgaagcggttggcgggagatattgccgtattcccccaactgattggcaagatagacggtatccttaataaatatggtaaaataaaagacaatgcgtccagcgaattggcccgtatccgtcgagaactgtccaatacgatgggaagtatctcccgttcattaaacagtatcctacgcaatgcacagtctgaaggctatgtagacaaagacgtagctccgaccatgcgtgacggtcgtctcgttattcctgtcgctccgggattaaaacgaaagatcaaaggtatcgtgcacgatgaatcggcaagtggaaagaccgtattcatcgaaccggcagaggtggtagaagccaacaaccgtattcgtgaactcgaaggggatgaacgacgggaaatcattcgtatccttacagagttttcaactatactgcgcccgtctatcccggatattcttcagtcttatgagtttctggcagaaattgactttatccgtgcaaaaagttattttgccatacagaccaacagtctgaaaccgacagtagaaaagaaacagctattggactggacaatggcagtgcatcccttactgcaactgtctttagccaaacatgggaaaaaagtagttccgctggatatagaactaaaccaaaagcagcgtatccttatcatttccggtccgaatgccggaggtaagtctgtctgtctgaaaacagtcggtttgctgcaatatatgttgcaatgcggtatgctgattcctttgcacgaacgcagtcatgcaggtatgttcagcagtatcttcatcgatatcggtgacgaacagtccatcgaagatgacctgagtacttattcttcgcacctgaccaacatgaaaatcatgatgaaaagctgcaatgaacgcagcctcattctgatcgacgagttcggaggaggtacggaaccacagatcggaggagccatcgccgaagctgtgctgaaacgtttcaatcagaaaggaacgttcggagtaataacgactcactatcagaatctgaagcattttgccgaagatcatgaaggagtagtcaacggtgccatgctctacgaccgccacttgatgcaagcactctttcaactacagatcggaaatccgggcagttcatttgccgtagagattgcccggaaaatcggattaccggaagatgtgattgcagatgcttcggaaattgtaggaagcgagtacatcaatgccgataaatatcttcaggacattgtacgcgacaagcgctactgggaagggaaacgacaaacgatccgccaacgggaaaaacacatggaagacaccatcgcccgttatcaaacggaaatggaagagttgcaaaaatcacggaaggagattatcagacaggctaaagaagaagctgaacgaatgttgcaggaatcgaacgcccgcattgaaaataccatccgtacgattaaagaagctcaggccgaaaaagaaaagacccgcctggtgcgccaggaactgaacgatttccgtacttccctggaaacaatgacttccaaagaacaggaggaaaagattgcccgcaaaatggagaagctgaaggagaagcaggaacggaagaaaaacaagaaaaacgaaccgaaaactgccgcatcacagacagccgctacccctaaagtaatgcctatcaccgttggtgagaacgtaaagatcaagggacagacaagcgtcgggcaggtcatggaaatcaatggtaaaaatgcaaccgtcgctttcggaagcattaaaactacggtgaaactggaccgtctggaacgaagcaacgctgcccccaagacggaaggaatagccaaaagtacgtttgtcagcagtcagacgcatgaccagatgtacgagaagaagcttaatttcaagcaagatattgatgtacgggggatgcgtggtgacgaggctctgcaagccatcacttatttcgtggacgatgccatccttgtcggcatggaccgcgttcgtatccttcacggaacaggcaccggaatactccgtacactcatccgccaatacctgtccaccgtaccgggcgtcagtcattatgcagacgagcatgtccagttcggaggtgccggaattacggtagtcgattttgactaatctgtaaacaaaacgatcgaagaacttgttctcatttagaaaaccactacctttgtgttacagtggttttctaaaacgagaataaagcatgaagaataatctgttaagcgaaaagcttatttacacaggggacagccttacccctacccatttacatctctgcacatacaatgcaaccgagatgcaggaaagctccggtgacaccttccaaagcgtcaaagaaacgctggataacgaacgaatcaactggttgcaggtacacgggctgaaagatacggaaaccatccgtgagatttgcagtcattttgaaatagacttcctcgttttacaagacatattaaatgccaaccacccgacgaaaatagaagagcatgacaaatatattgtcctgatcctgaaaatattctatcccaatgagcataaagaggatgatgacctcgacggattgctccaacaacaagtctgcatcattctgggaaataactatgtacttacctttcttgaaaaagaaacagatttctttgatgaaatcaacgccgcattgagaaacgatatactgaaaatccgtagccgtctgacggattatctgctcagtgtattgctgaacagcatcatggcgaactacatttcaacgatatcttccatcgacgatgcacttgaagacctggaagaagaactgctgatgattaccaatgagaatgacatcggcattcagattcaggggctgcgccgccaatatatgctgatgaaaaaggccatcctcccgcttaaagagcaatatgtaaaattgttgcgggcagaaaatctccttatacataaagtaaaccgtgccttctacaatgatgtgaacgaccatttacaatttgtattacaaacgattgaaatctgccgtgaaacactgtcttcattagtcgacctgtatatctcgaacaatgatttacgaatgaacgatatcatgaagcggctgaccatcgtatccaccattttcatcccgctaacgtttcttgtcggtgtgtggggaatgaattacaaatggatgcccgaactggactggcggtacggatatttatttgcctggattataatggcggttatcggtattattgtatatttgtacttcagaaaaaagaaatggtattaactaaagcgcacccatccatgaaatcaataaaagaattatacagaatcggcacaggtccttccagcagtcatacaatgggccctcgtaaagctgcagaaatgtttgttgaacgtcacccggatgccgcatctttcaaagtaaccctttatggaagtttggcagctacaggcaaagggcacatgacggatgtggctatcatagatactttacaacctgccgctccggtagaaatcgtatggcaacccaaagttttcctccccttccatccgaacggaatgacgtttgccgctctggatgcagacaacaagatattggaaaactggacggtttacagtatcggcggcggagctttggcagagaataatgacaacccgacaatcgaaagcccggaagtatacggcatgaacaacatgaccgaaatcctgcaatggtgtgaacgtaccggaaaaagttattgggagtatgtcaaggaatgtgagaacgaggatatatgggactatctggcagaagtatgggacacaatgaaagacgctatccaccgaggtctggaagcggaaggtgtattgcccggaccgctgaacttacgtagaaaagcttccacctattatatacgtgctaccggatacaaacaatctctgcaatccagaggactcgttttctcttacgcactggcagtcagcgaagaaaacgcttccggtggaaagatcgtgactgcccctacctgtggttcctgcggagtgatgccggcagtactttatcatttacaaaaaagccgtgacttcagtgacatgcggattcttcgcgccttggctacagctgggctaattggaaacattgtcaagttcaatgcgtccatctccggtgcggaagtaggatgtcagggagaagtcggcgttgcctgcgcgatggcatcagcagcagccaatcaattattcggaggaagtccggcacagattgaatatgctgcggaaatggggctggaacaccacctggggatgacttgcgaccccgtatgcggtctcgttcaaatcccttgtatcgagcggaatgcttatgctgccgcccgtgcactggatgccaatctttattcagcctttacagacggtatgcaccgtgtttctttcgacaaagtggtacaggtaatgaaacaaaccggacatgacctgccctcactgtataaggaaaccagcgaaggaggactggccaaagattatcaacaaatgtaatataatgactacagaggagtgtctgtccacattcctctgtacataactaattctactccataaccggccaattcgtatcatcgccattggtgatatccctttcatgcaacaagcctccttcctgcgaaaagtacagtgcaaatctcagatttccctgtttcacctgaatcacggactcagtaggatgctgcggatacgtcaatacaaacacatcggtcactacccatgaactgtagttggaattacggaaaccggtataaacggcaggtactaactgatcgatactatccagttcgttttccgtcatcacccagttggcattcgcgtcgaaccagacatccagttcatcaccagtcacccagcagtcagctacataataatctcctttcatctcccactccacattctgggcattcggatatagttgcttcaatgcctcagtgatattggcaggcggattatacgtttcatcatcattgtcatcacatgcgctgaaagagaaggcagtcagcattaaaacgactgcccatgcgccaaacttaaacttcaacataattaattcttaggatttaggttatatcatattttcatttactcatcaatcatccgctttcaggaattttcctttcttgtcgaacttgaaagaaacaccggtacttaattccacttcatatcctttccggtcacgctctacttttgtcacaggttctgtgaagttatgctctttcagataactggcagcaaacgaaggaacaacacttgccggaactgcatgccctttaccggcacttacttcctcccagttacctttgctatcaaaatctatttccgtaccgtccgtcaataacacttcatacttggcagactccaacagatctttatcaatcttgatatgagccacctgaggtttggtaaaatgacggttgataaagttgcgtgccggaagcggtagctgattcatatcctttgtaatcacatcgccggcaaatgagaactgtatagctacaatagccatcacaagcaaagataaaattttcttcataatcgttattctttttagttaatactatatctgataagttttatactgcaaataacgatacagatttaggaaagatttgggaataaccagagatcacattcttttttgtgttctttaactttcagtcttgaatttaccccataaaaaagatccggatgcccactcaggaacatccggatcgctctctcttcaccttaacttttaaccttaactatttacctatttatctttccgaatatcctgcgagattgtagcaaacgggaacggtactatcacctacgcggtaaattccgaacttaaagtaatacccgtcttcgtcgttacgtccaatcagaatcttctcattatcgacaatgtgtttgctcactttcttaccttgctcctgataatccatccgtacatccagcatccccggtttcacaatcgtttccgcttccttgccatagaccgtccagtcgatatggacacggaaagtaatccagcagtctttcgggaaatcggcaaaaggtaatttgtaggcaatggtggatgccttgtattcagaagtcagcggtttcataacgggcgtctttcccgggtttgcattgcaacggtcatctttgtctgtcagccatttacggtcggagtttgctttgatataaaacagtcctccggaaaatccgaatgccaatggcgggtatcctccctgttcaaccaaccatccgttgggttttcctgccttatatacaggttttccatttttatctttcaccggattgccttgtttatccagtctggccactttttcgtgtccgacattctttttgaagaaggtcgttttttccagttctacaaattcgtcaacagtcagtttcttcacctcgccctgaggagtctggaccagcgtccggtcgggcattccgtgccattgggcaaagatggtggagacgttgctgtccagagaagaaggaatataaaccgaaaactcatagtcgcgggaacttccttgcggacaagctcccttcccgtgatgataaacagtctttgtgatctgtgctttctgataaacgtcggcaggtaatcccctgaaatcgtcggaagttgcatagcaatatgaaaactcggcacgtcctttcgtttctcctttcgcataaccttccagtgtattgtcttcggttttgagttcaaagcgataggagggcttgccatcaaacaggttggtaaaatcacgctgaatggcatgaggtttattcgtcccgacagctacccagcaaccgtcaataatctggttgatacgtgcagagtcagcctgtacgtttacccgttcggtgagtggcatcagtgtttgcgtatttttagtctgagcagtcagcatcgtgcatcctgccgccatcatataaataaccaaaatgtattttttcattctatccggtattaagtttatcgacggtgcaaaaatacgaaaggcaacccttacggctgcctttcgtttgtctcaaatgctttcacatttgtgcaattcttctgtcagaaacgtcttatatccccattcacaagtctattcaggtgtttcttccgtataatcgtcttccaacatatctactttctttatgctcatttttccatcggccgttacagtgatggaaagcggaacatacaaatcggtctgcggataacacacactggcggcgtaaacgattccctccggtgtggtcttgtcatatacgattccttcaagtatggattttgaaaggaatttcgcgtcgactaccgatgaaaagtcgttcttcgtaaatgtcttgttgagtacgttttcacttccccgggtgatgcgcaacactattttattgtctacatacgtatcccccatctcattggagacgtgaggcagactttcgtcaggagtacgcgaaaccagcgaatgatagtctcttcccttaaacttaatatcagtttcagcttttgaactttgcatacgctgcaacccgtgagcatctacactgtcttgccttgccaataccgattctttatttgaacttccgttcttaccgccacaggctgccactgccagagccaatggtaacaaaagcagataaattagctttttcattccgaactattctgttttataaatatagagcaaaggaacaaaaagacggggagatttacaagtgtaaccgacatttttcctacatttgcaatcaagagtgctaatattaacacaacaattaaagatttaatgccttgcaaacctgatatcatgtatcaacgaatcatagccattctttttttcctttgtgcatgttgcattcaaagcagcaccgcctatggacaaaaagtaaattatcagcaattcgacaatatttatctcggtgctgaagcatcggtggtcagttgtttccttcaagacagcgaaggactgatatggataggttccaacaagggattattcagttatgacggttattccacacagcagcatttcacttacggagaaatcaataacacccgtatctattgcggtgtcattatagataacacctatttatatatgggtacggacaacggaatcctaatctacaattaccggactgaccgctacgagcaaccggcaacagactttccgacagatgtacgcacaatggcacttcaaggagataccctgtggataggcgcattaaatggcttatacacctatcagctgcaaaaccggaagctaagtcctctcggcacaaagcgcaacggattaccccataataccatctactccattatccgcaccggagacaatcagatttatgtgggaacctacaacgggctgtgccgctatattgcctcaaacgggaaattcgaaaagattccccttcccgtcaatagcagtcaaagcaacctgttcgtcaattccttgctggaagatacgggccgccaatgtatctggatcggtacggaaggttaccttttccagtattttccatcaaccggacagatgaagcagacagaagccttccataacaactcgatcaaatcactggctctggatggaaatggatatctgctggcaggtacggacaacggcctgtacgtctatcacaatgatgtcactcctctacagcacatcattcacgattcccgcaatatccagtcgttgacgaataacatcatctggaatatctttgccgatcaggaacataacatctggctgggcaccgactacggcatttccctttcacgctacaacagcgccctgcaatttattccgatctcacagattacaggtacgggagacggaaatcagttctactccctgttccgcgactcaaaaggtttctactggtttggaggtaccaacggattaatccgcttcaccgatcctgccggagacaagcataacgctatctggtacagaatgggtgacaagacttatccgttatcacacaaccgtatccggcatatttacgaagataaggaacagcagctatggatagctaccgacggaagcatcaaccgctacgattatgcaacccgccaattcgtgcactataacattgtagacagtacaggaacatataacaccaactggacttattatatgttcgaagacaatgccggacatctgtggatttcaacctgtctgggaggaatctttgtagtagacaagcacaggctgatgcagtctgcctccggacaatatgtagccgaacagaattactccgtccacaacggactgtccggcatgtttatcaaccagattattcccgataatgaaggcaatgtatgggtgttgctctacaataataaagggatagacaaaattaatccccgcacacgggaagtgacaaaattatttgctgacgaattaaacggagagaaaagccccaactacctgttatgtgatgaggacggtatgctctgggtagggtttcatggcggtgtcatgcgtatcaatcccaaagacgagagccagcaaagtatctctttcggaagtttcagcaacaacgagattttgtccatgacttccgtaaagaatcacatctgggtgtccactaccaacggactttggataatcgaccggaaaacaatggatgcccggctgcagaatatgacagacaagcgcttcacaagcctgctattcgatccgaaagagaattgcatttatctgggaggagctgacggcttcggtatctcacaccccgatatacaaaccatacaccaaccggaacgcccgatcctgttgactgccttatacattaacaatcaactggtatcaccacgcaccagagatgacgtgcccaatatccgatataccaactcgatcgaattaaaatataatcagaataacctgtcattcgaattatccgatcttccttattcactggatgagaaaaacaagttcgtttatcgtctggaaggaatggacaaagaatggaacttcctgaaatccaatatcaaccgcattacatacagtaatctgagctacggaaattatcagcttattatcagcaaactgggaaaagacggtcagccgtccgaccagccttatattctgaatatccggattcttccgccgtggtactatacaatatgggcaaaagccatctatgttttactgctgcttagcctgattgcatggacaatcaacttcttccgggtaaaaaaccgcctgaaagcagaacgcagggaaaaagagaagattctggagcagtcccgccagaaaatggccttcttcaccaacctgtccaatgaattaaagacgcctctcagcaggattattgctcccatcagccaattacttccggctacagaggaagcgcatgagaagcaaacactggaagaggttcagcgcaacgccatgaaaataaactcgctgattcatcaggtactcaacttcaaccggattgaagacaataaagattcattgcttatcctgtcgcgcatcgaactggtatcgttcagccgcagtctattctctgtatatgaagaagacaaacggttcactttccatttcgaagcaaacaaagcaaagatttatgccgatatggatgcgatcaaactaggagtgatattggataatctattgtcgaatgccgtcaagtttacctccgagggtggaaatatccgtttatcccttttctatcggcaagaaagcggtctgctggaaatttgcgtatccgacacaggagcaggtatcccgcaacaggatattccttatattttccaacgtttcttccagtcacctcatagcggcagcaaagaaggtaccggtatcgggctttacctggtaaagacttacacagaactgcatggtggctctatcaacggagtcacttccgaaaaaggaaagggaacttccatcggactgagtattccggtcaccgcagtagaagaggatgaaataccggctgcacagtctaaaaagcagttagagtctcttcctgtacttaaaccgatcgaagctgagtcacaggatgagaaattcctttcgaacatcatccgtctgatcgaagatcacctctccgatgcagacctgaatgtaaatgcactttgcgaactgtcgggaatcagtaacaagcagatttaccggaagatcaaacaactgaccggaatgtctccggtggaatatatcaaatctatccgaatgaagaaggctgccatgttactgcaacaaaagaaattcaccgttgccgaagtgatgtatatggtaggcttttccaatcactcttatttctccaaatgttttcaggcagagttcggaaaaacgccacgccaatacctgaatgatgagttgtaggggcatttcagggcatttcgtcctatttttatccttatatgtccaatctgtgcttttattaaaatgacaggtaatctatctttgccgctatcaacaaaccagtaaatttgatagcatgaaaagacagtttattcttacctgcatttgcctgttatttacctttgtcggcacacaagggaaaacgacttccatacctactatatatatagatggaaacggagtgatgcgttggagcgacactcatcgggaagcttccttcttcggtgcaaattatactacccctttcgctcatgcttaccgtgctctcggatacttgggagtagaccgtaaggcagctatagataaagatgtgtaccatctttcccgactgggattcaatgcctatcgtattcacttatgggatgtggaactgacagacggagaaggaaatctttcagaaaacgatcatctggacctgatggactacctgattgccaagctgaaagaacggaatatccatatcgtgattaccgcacaaacaaacttcgggaacggatatcccgaacggaacgagccgacaagcggcttttcttataagtacgacaaatgcagcatgcactccgaaccggaagctattgccgcacaagaaagatatctctatagtttggtgagacacaccaatccctacaccggactggcttacaaggacgatccgtctattgtaggatttgaaataaataacgaaccttgccattccggcacaaaggaagaagtaaaatcctacatcaaccgaatgctgaaagccatacgcaaagccggcaaccggaagcctgtattctacaatgtaagccataacgaatggacagtagaggcatactatgacaccgatatcaaaggaacgacttaccaatggtatcccatcggtctagtatccggacaaacacaacaagggaacttccttccctatgtagaccgctacgatatttcatttgccgataaagtaaaaggcttcgataagaaagcccgaatgatttacgaatttgatccggcggatatcatgtactcttatatgtatccggctatggtccgcactttccgcacagccggctttcaatggattacccagttcgcatatgacccgatggacattgcctacgcgaataccgaatatcagacacattttctgaatctcgcctataccccgcacaaggcaatcagcatgaaaatagcttccgaggcagcacaaagcctgaagagaggcgcatcttacggaagttatccacaagatacgttgttcggtgaaggtttccgggtaagctatacagaagacctcagcaaactgaacaacggaaataaattctattactccaataccacccgtacgcaacccaaagatgcctcacaactggtatccatcgcagggtgtggaagttctcctgttgtgcgctacgaaggtacaggcgcttatttcatagaccgtctggaagacggagtatggagactggaagtgatgcctgatgcaatcatcgtcaatgatccgttcgccaaaccttcgctggagaaagaagtagtaaccatcgcttacggtgcctgggacatggccttgcaacttccgaacctgggaaatgcattcaccctttccgccattcaatcgccggccaattcaacacttgcttcctccgcccacagagagaacagcagaaaagaggaagtgaaagacggagtgattcactccctccgtccgggcgtttacctgctgcaacgcaagcattgtgcgccgaagcaaaactggacagccgattcgcaatggaatacgatcagactgggcgaatacgcggctcccgcaccacgggcaacgagttaccgagttatgcatacacctgccaccactgtggaagccaacaaaccattgaagatcacagcacagataacaggtccggaatttcccgactccgtcatcatttacaccgacaagatctctttctggaacgatcacaatccgtccgtcaagatgcagcgcacaaacggctatacatatcaggcaacgatacccgccgaagagataaaagaaggttatttcaggtataacatcatcgtctgccggggcgacagtacccgtacttatcctgcagggagttccgctacaggaagttcttccggtacaaacggaaatccgctggactgggactacaccctcagccaatactggactacccgtgtagtcgccccaggtagtgcgatacagttactgactgtaacagatacccatagccggatagaagcctatacactccccgaatggaacgagcttcaccggagtttaaccgattcatctccgacagaaaagccattgctccggttcacctttacatcaaaaggagagaatccgcaatacttccttcgcacatttgtcaaagataagatagacggaagaaaaggcaaaataaaagattgtaccgtcctctgtatccgggttaaccgggcgaaggctcttccggaaggaatcagtgccggtttcgttacatcggacggatacacgtacaaaagcccttgtccttctccctcaccggaaggaatcatacgaatccctttgaaccggttgcgtcagacagacacggcattgcttccggtagcttatcccgtcttcctgaaacagtacttccagccggaaacggaaatacccttccaggcggagaaaatagaaaagctggaaatatcaatgccgggcaatgccagaccggtaacagagatcgagcttggagagatctggctggaatgatactattaaccgatatttcaataaaataaatctattatcaattacacaataattatgaacagtaacatcttaaatctacgccatctgactgtactattcatcttatgtacagcctttcttggaggcgcaattcctgcctttgcccaacagggaggcaagaaaatgaccggacaagtgatcgatgagaacaaagaaccgatgatcggagtgagcattctcattgtaggaacatcaacgggtacagtgaccgactttgacggaaactacactctgaatgtaccgaaagacagtaaggaactacaattctcttacgtaggatacgaaactaaagtgatagctatccccgcaaacggcaacgtactgaatgtacaaatgaaaagcgactcacaagtactgagtgatgtagtagtcatcggatacggaacgcaacgcaaaagtgacctgaccggttcggtgacgaatgtcagcagcaaagacttcaacatgggactggtaagttctcccgaacaactgattaacggaaaaatctccggtgtacaaatcatgtccaacagtggttcgcctacttccggaagcacgatccgtgtacgtggaggagcttcactgaatgcaagtaacgatccgctgatcgtattggacggtgtgcctctggaacaaggaggtatcagcggtaatgacggcaatttcctgagcctcatcaacccgaatgatattgaaagcatgacgattctgaaagatgcctcttcaaccgcgatctacggttcgcgtgcatccaacggtgtcatccttatcactaccaagaaaggaagttcggacaaaatgaaaatcacattcagcactaccaactctattcagacccgtacaaagttagcggacatgttgagttacgaccagttcgtgaacaccatccggacacaaggaacggctgcccaacaagccttgttggggacagcccgcaccgactggaacgatgaaatataccagaatgccttcggaacggacaacaacctgagcattaccggaaagattgctccgaactggcccatccgcgtatcggtaggttactacaaccaaagcggtctgctccgtacggacaatgccgaacgatacaccggaagtgttacgctcaacccttctttctttaaagaccatctgaagttgaatatcaatgcaaaaggttccatcaataacaacacgttcggtaatacggaagccatctgggcagcttctactatcaatccgaccattccggtttattccgacctggacactttcggaggatatacagaggcggtagacaataccggtgcaccggtaaacggagcagtaatgaacccggtaggtctcatccaaatgaacgactcgcatagtaatgtcagacgcttcatcggaaatatcgatgcggattaccgtgtccacttcttccccgatctgaaactgcatgctacgataggttatgattacgcacaaggtaaagggagtgtatatgttccggcagaagctgcacaaaactacaccacttccggcctggattacagctatggtccgcaaaagaaagaaaaccgtctgctgactttatacgccaactacaataaactggtggaaccgatcaaaagtagttttgatgtgacagccggttatgactatcagtactggaaagcaaccaaccctctttacagtgaaatgaatacactcggagaagtgctgaaaacttcgaaagcaaccgatgaacgccatgtactactctcctactacggtcgtctgaactactcgttcgactcacgctatatgctgactaccaccgtacgccgggacgctacttcccgttttgccaagaatgtgcgctggggtactttcccttcggtagcactgggatggagagtgacggaagagtctttccttaaaaacaacaaagtactcagcaacctgaaagttcgtgccagctacggtgtgaccggtcagcaagacggtatcggcaactacaactatctgcccatctatactatcagccagaatggtgccgaatctatcatgggtaatgattacatttatacttaccgtcccaaatcgtatgtttccgacttgaaatgggaaacgactacttcatggaatgtcggtttcgacttcggtttcctgaaagaccgtattaccggtagtttcgactactacacccgcaaaacggaagatctgattgcaaccgtccccgctgcagccggaacgactttcgaccgtaacatcacgactaacgtaggaaatgtagacagccagggtattgagttcagcctgaacgcaacaccgatacaaaccaacgactggaactgggatctcagtttcaatatgacctggcagaagatgaaggtgaaaaacctgtcgctggctgccggagctgctgctaccaacacttccgtaggtccgtatatcgacagctatcaggtacagacattaagtgaaggatatgctccttacatgttctacgtttaccaccaactgtatgatgagaaaaccggtaaaccagtagaaggtgcctatgtagacctgaacggtgacggagaaatcaataccgaagacctgtatcgctaccactctcctgctcctgactatattcttggcttcagcacctcactacgctggaagaaatggacattgagcaccagcctgcgtgccaacatcggcaactatgtatacaatgcaatggcgatgaacaccggagcctgggaaacggtaagctacaactcttatcagttgaacaacctgtcgacgagctatctgaagaccggtttccagtcccgtcaatacttgtcggactactatgtagagaatgcttcgttcctgaaaatggacaacctctcactgaactataatttcggtgaaatctgcaaaggatgcagcctgaatgtcagtgctatggtacaaaatgtattctgcatcaccaaatacagcggtgtagacccggaagtacccaacggcgtagacaactctttctacccgcgtccacgtaccttctcactcaacgtaggtttcaacttctaattacttaaaaaagcgcattatgaaaaagatattttatacagccttctatttttgcagcgcactgctgctaagttcctgcataggcgatttggaccagtatccgcatgaagacgaaacagccgccagcatctacaccagcgccgcaaactataaagccgtgttagggaaaatctatacggcaatggtaactaccggacaagaaaaaagcggtgatccggatttgagcagcaacagcggacaggactacatgcgttgcttcttcaacctgcaggaatgcggtacggacgaagtagcctctacctggttgtccggtgacaacgtgaccggcctcacctacctcagctgggatgccaacgacccgtgggtatcggatatgtactaccgtatttattacaacattgcattgtgcaatgagtttatccgcaacgctaccgacgaaaagctggcacaatttacggaacaggaacaaagtgaaatccgtcattaccgtgccgaagcccggtttatgcgtgcgttgttctactatcatgcactcgacctgtaccgtaacattccgtttgtgacggagaatgacccgacaagcggttatctccctccacgctatacagccgcacagattttcagttatatcgaaagcgaactgaacagcaccgtgaatgatatgctcgacaaagcgaattgtccttacggtcgtgcttcacagggagctgcatataccttactggctaaactctatctgaatgcggaagtgtacaccaatacttccaaatataccgaatgtatcagtgcctgccaacaggcaatcgctcagggatattctctggaagacgattacagcagcctgttcaatgcggataatgacaagcgcactgccaatgaaattatcttcaccctgccggtagatgctacgcataccgtatcatggggttcttccacctatatcatttgcggtgcggtaagtaatacttccgacaagcaagtacccgaagactatggggtgaaaagcggctggggtatgttccgcgtacgcggtgaaataccagctctgtttacaggagaagctgaccaacgctacttattctttaccgacggccagactcaatacctgaataaaatagatgatcagtcaaacggcttttttgtaacgaaatggaccaaccttacagataatggtcaaacggcttccaatacagccgacggcggtgtgaacaccgattatcccctgttccgtctggcagacgtatatctgatgatggcggaagccgttgtacgtggcggcacaggaagtgacagaggaacggtattgggctatatcaacgaacttcagagacgggcatacggtgacgatgagcacaaaatagcagattccgacctgactcttgacttcttgttaaaagaacgcgcccgcgaactttactgggaaggacacagacgtacggacctgatccgctacggcatgttcacaaccgacaaatatctgtggcagtggaaaggcggcgagaaaggcggtacagccgtaaacagcaagtacaatatctatccgataccgaatacggagcttacagccaatccgaacctgtataatgaaaattattaattatcctctaatacgaacgatatatgaaaacaataaatagtctgatcctctctctggcaaccctcttcgtattgggtgcctgcgaagaagacggagataaatattacttgtcgagcctgacaagcaatgaactcattgcttcgacaaacaacatcgtactgaccgaagcgaccgcacagaagaatgtgttatcgctggcatggacagaccgtacactggctatcagcaatccgaactttaaaccgactaatttgctgaaaaccgccatgcaagtctctttgagcgaagacttctcgggtactatcgtagagtctgccgaaacctccctttcgaagacttacaacggtgccgaactgaacattgtcgctaataatctgggagtggaagccaacgtggccgcaaaattctacttccgcctgaaaggaacgacgggtaacaacatcgatccggcttatagcaacgtagaagcagtaaccatcaccccgtatgagctggatatgcgctttgccaacgtactcgaccagaatgcgactgccacaggaatgactctgttctccgccaataccgacggtatatacaagggcttcgtcggtgtagagggctggttcaacttcctggtacaggaagccgacggtaccatctggagaaatgacaacgagaccggaatgccgttcctgctcactacagccggcgactggaagtgctggttccccggaactgccggttgctactatatcacatttgataccaacagcaagcaatggaacggactgctgattccttctttaaatgtcagcggagacatcaatgccaccatgacattcgaccgtaccagccggaaatggaccgctacattcaatgcggatgcaaccggaacaatcaccgtccggattgacggaaccggtaaactgtatgaccatacctgcgccaacctcaacgacaatggcggttatgacatcgacgatacaaaagccaaggacacccctgtcgcattcagtggcagcaacgctgcattgagctttggagaaactgccggagatatcactgtcaatgttccgcaaacaggagaatgtacactgagcatcgacctgagtaatccgcagcaatggacagctaccgtagaggaaggcggctccgtagaaccggaacccgaaccggaagaaggacaatatctgtatctgccgggaatcggtccggacactgagtgggcatacgaccacaaaatagaagtctattacaaagaagaacagaagtatgccggcatcgtagacgttaactccaaatatggaaactatgcgatgaccttattctcatcgggcaatgagtgggataccagcagaatgtacaccatcgccaaggatgatgctgccagcacagccgaaagcggtacgctgattaacggacaaggcgataacattcctgctcccgatgccggactgtatctgttcgatgtatctctgaaagagcttacttataagacgtatgctcttggcgacaatatctattgttactacggaatagagaatgacaacagcttcaacccgattgcaagcaccggaactgccggcgaatactccggtaccatcacactggcaacagattccaaatggggagccaaattctatatagaaaatgcatggactgctttctacggaggaagcgacggcaagctatattacaatggcgatggtatcatgctgaaggctggtacttatacaattacagtgaacctgattgacggaacttattccgccgttcagcaataacctttagataacgaagaacaatgatgaaacaattcaaaaacatattgatggcttccgcactgttgtgcggagccttcttcaccgcttgcgacgacaacgatgaaaagccggtatttccggaaaatcaagagaatgtgtatgatatgtccggcttcgccaaaggagcggacgtcagctggctgacagaaatggagaaatcaggctacaagttctatgatgccgaaggcaacgaccacgaatgcatgtccctgctccgcgatctgggaatgaactcgatccgcctgcgtgtatgggtaaaccccgaccagggatggtctgaaaacgaaggctatttcaatcccgaaggctggtgcgacaaagacgatgttgtgaccaaagcatggcgcgcccacaatctgggttatcgtatcatgatcgatttccactatagcgacatctgggccgatccgggacgacaggaaaaacctgctgcctgggcagacttgtctttcgaggaattgcagaaagctgtagccgaccacacgactgatgttctgagtgccatcaaagcaagaggtatcgatgtggaatgggtacaggtaggcaacgaaacacgttcgggcatgctgaaacccgacggagcggccagcagcggaaacactgccaactttgccaaactggtaacttccggttacgatgccgtcaaagcaatctatccgcaggcaaaagtgattgtacatatcgacgaaggcaacaatcccaaccgctatatctggctgttcgacggactgaaagcagacggtggcaaatgggatgtaatcggcatgtcactctaccctgatccagagacacaggactggcgcaagctgaacaacgactgcataagcaacataaaaaatctgatcgaacgctataatactccggtcatgatgtgcgaactcggcattaactggaattacgaagaagcagaagcattttttaccgacttcgtgacaaaagcgaaagaaatagaccaatgtctgggcgtattcacctgggagcctcagtgctacggtggttggaaagggtatcacaaaggtttatttgacgacagcggcaagccgacttctgcatttaatgccttcaaacgataaatttattgaatccttttcataactttaccccgaatccctaatttatatacctgaaaaagagaaaatgaacatgaaacaccaaaaacagttgctaactgtacttttgatgagcgcagccagtatgctgcaagcacagcgcagcgaaacgctactcgaaaagaactggaaattcagtaaaggagattttccggaagctgcgcagactgactacaacgatactaaatgggaatcggtcgttatcccacatgactgggccatcttcggacctttcgatgtgaacaacgacctgcaaaatgtagcagtcacacagaactttgagaaaaaggcatcactgaaaaccggacgtaccggaggtcttccatatgtcggaaccggatggtatcgcaccagtttcgatgttcccgccgacaaggaagtcactctcttgttcgacggagcaatgagcgaagcgcgtatatacgtcaacggacaggaggcttgcttctggcctttcggctacaattcttttcattgcaacgttacccctttcctgaataaagacggaaagaacaatacactggcggtacgcctggaaaaccgtccgcagtcttcacgctggtatccgggagcaggtttgtaccgcaatgtacatctgattgtgacggacaaagtccacgtccccgtatggggtacgcagatcaccactccccatgtcagtgatgaatttgccgccatacgcctgcagacaaagatagagaatgccggcgaaaagacggaaatccgtatagagacagaaatcctgtcaccggatggaaaggtagtgacacgtaaagaaaacaaaggacgcatcaatcacgggcagccgtttgaacaaaacttcatcgtcaatgcgcctcaactctggtcgccggaaagccccgctctctacaaagccgtatccaacgtgtatgcagacaatcagctggtagatacctactctacccgtttcggtatccgcagcattgaatatattgccgacaaaggtttctatctgaacggaaaacaccgcaaatttcagggggtatgcaatcaccatgacttaggtccgttgggtgcagccatcaacgtagcggcacttcgccaccagctcacactcttgaaagacatgggatgcgatgccattcgtacttcccacaacatgccggctcccgaactcgtggaattgtgtgatgaaatgggattcatgatgatgatcgaaccgttcgacgaatgggacatcgccaaatgtgaaaacggatatcaccgttacttcaaggaatgggcagaacgcgatatggtgaatatgctgcacaactatcgcaacaatccttgtgtggtaatgtggagcatcggcaatgaggttcccacccaatgcagccctgtcggatacaaagttgcgaagttcctgcaagacatctgtcatcgtgaagatcctacccgccccgtcacctgcggcatggaccaggtatcttgtgtgcttgccaacggatttgccgccatgatcgatattcccggtctgaactaccgcgccaaccgctatcaggaagcatactccaaacttccgcagaatctcattctgggtagtgagaccgcttctaccgtaagttcacgcggagtctacaaattcccggttgaggataagaaaagtgcgatatacgacgaccatcaatgttcttcttatgatgtagaggcttgttcgtggtcaaatatccctgacgaggactttgcattggcagacgattaccactggaccataggacagtttgtatggaccggcttcgattacttgggtgagccttctccttacgataccaatgcctggcccaatcacagttccatgtttggcattatcgacctcgccagtttgcccaaagaccgctattacttataccgcagcatatggaataaggaagcggaaacactgcatatcctgccgcattggacatggccgggacgcgaaggtgaagtaactccagtatttgtttacaccaactaccctgctgccgaactgtttatcaacggcaaaagctatggcaaacaaagcaagaacaacagttcattgaagagccgttatcgcctgatgtggatggatgctgtatatgaaccgggtgaagtgaaagtagtagcctatgataaagacggaaaagcagtagcagaaaaagtggtccgtacagccggcaagcctcatcacatcgaactggtcagcaaccggaatgaactgacggcagacggaaaagaccttgcttatgtaaccgtgaaaatagtagacaaagacggaaacctctgccctgccgacaaccgcctgattaacttctccgtcaaaggagccggaacataccgtgccggagccaatggtgacccaacgagtctcgacctgttccatcttccgaagatgcacgctttcaacggaatgcttacagctatcgtacaaacgaatgaaacagccggagaaattattctgactgccaaagccggcggagtgaaagcaggaagtatccgtcttctgacgaaataatcggtctacataaagaaatatatttgaaaaattgctgtcacctgtcaccaaacgagtgataatagtctgataattaaaccataagaccgtgacagcaacgtgtgatagcagtgtgatggcaagtattgccgtcacactgctgtttcatcttagctccctcctgcacttctactgatatcaagtcaagttcgtttccctatttgaaactatagttcccattgcttgaaactctagtttctattgcttgaaactttggtttcatacgctcgatacttttggtttcaagcctttggaactatggtttcttactgatgaaactacagtttctcaccgatggaactctagtttcaagcagtggaaacttatcaagcctacagcttattcaaactgttatcattaatccgccatttacagtaaatgccggatcgcagttcttcttatattactaaagttctagggtgcccagtttgatgttctcattttagagaagaatttaacagtacgataacaattgcattaagaatgtcaaactgaacaccctaacattttgccactatttataacttagataaggagcatctttcttctctgcctaactgattgtactttgcacgggcaagtattgtaaattttcctctaggaaattttgcataaaagtgaccaagagaagtattattcatttgattcgatagatataaataccatcagtataagtataaagtattaaaatatcatcatattgttcaatatcaataattccacctacacccaataaatcggcttgataaagtatagaccatgtatcaccaccatcagtagaatgatgaattgtaaatttatgttcttctttaggaatacgggtgactccagtagaatatagtatttgtggatttctcttatcataaattgttttgtaaaaatatacatcatccttcaaaacaggattccaaatccgacctttatctatagttttctttaaaaaatattcccctgaatatatcattatatttggattagttgggtcaaaagctatatgatgtatacaattatttctttcattctcaagtattatccaatctttcccatcattacaagaagcattaataaaagattcaaatatcatagtttcccctgtattgtaaatatttgtagtgtcttgaggatgaaatccaacaaaccaattctgatagccgccataaaaagtactgatagtcttccaactttttccaaaatttaccgatttcactactccaataggttcgaccaaagccaatagtgaattcgcattttgggagttttgagatattgagtaaggtatgacctttaactcattctcttcaattaaaaactccggtggcgttatcgccttacaagtttttccaccatctgttgaaagcacaaatgccttctcgtcagtgcaagctgtaattgcaattatagaatcccccttcataacaaactggattactggaagaccggagaacgcaaacttttcccagtccatgttattcaacgacttcgctggctttcgatatatccccgaccacgttgctatgtaaatatatccatcaactacttgaacagacggtctataaggacgcccataagtattccaaactttttcttgggcctctattacatttgctttatcttttaatccaatatattcaaaaatcttctcgtcgtcagtaatttctcgtaggttattatcatccttacaagaaataaacataactgataaaaacaaaattaaaaataatgatttcatttataattgctttataattagtctaagtggtgattacaaattaatttaaattatgcgtatattggtttgtctgcaggacgagtcaatattcattatatactaaaatcctttagaacaaacctttatattatctaaaatattattggattgattcttttcgagagaatccctataaacaaattgtttgaccatattaaaaatttaaatatagaaccaataaatgaaaaccagctatctatctggtagcatttatatagacactagtatagttaaacatttgcacactataatcaaataattgagtagcaagcacaatagcaatgcgttaaataaaaacattcatttcacagtatatgtgcatatcattgcattcttcacaatcattcataccaaataactattgcaaatatataataaataagcagtacatgctataaaacacagcctacttcttcaagattaactagtattagtattttcaacgtaaatttagtgccactcgttgccacccaatgcgcaattctcattaggaaactacgtatatcagattgaacgtgtagctatagtcatgtgtgtataatcataagatagaaaagaagaaaaggctggcggcataatcagcgctaatacatgaaaaacggaaaagtttattaacttcctgctaaaaggcaggcccctacatcatgatttcaggatgtaagatacagatatgtaaataatattatcaaaaaaaaaggaagaataattgagatctgtatataaaaaatgaagagaaaaatctctaaaaattaatattatcctattcatttatagaaaataaggacatttacagaatatccctaaataaactacaacgagtggcaacagcgtgacggcaaattctgccatcacactgctgtcactcgttgccgtcaccatatttatacctaaaaatcaacctgttacatctaaaacagtgacaggtgacagataatatttgtttttatttatataggatgaagaaaatatagatgctactgatattatttacagataaacgtaaccaacaatcctttgtgatcggttggccatacatcaagcggcaataagaacttatctttggatgtctcctgcacgcgctgtgcgcggacaatagaacctttcggtccgaagatgaccgccttccttgcatccagtccttcgcctttatagaaaataaagtcgatccggtcccgctcgtctgctttgggagcccatgtgattttctccggagtttttgccggattgtccgaaggataagtaaagccgggatgtgtcaagggattgggatatatcttgcggtaactatctacaaatccggcttcttcgagcaaagtcgttaccgtccagggcacaacgaagccattgtgatcgtacatatctttattcttttctatccagtcacagtgagacggttcgttaaagtcaccgccgataatcactttataccctgctgccaggtctttctcagcctgagtgataaacaaacggatagcatcgtcacgctgggaagcaacgtttactttcagtatctcttctaccgatgccggcaacggtatttccttccaggtagaaccgtcatagccgcgggcattgtagtatgcacaatccagataatccagatgtgacgtgtaaaccgctaccttatgcccgtttaccgaactggtcaggcgatagatacttccgtgatcgtctttctcgggaaaaacagtcagggaatcggtgataggatgtttgctcagcagccccgtgtcataactataaaaagaataatacgaaagccccttctctttcagcgaagcacagacgcgggctgtgaaattcgtcttattgtaattcctgacttcactgaaagttacaaagtccggtttcaggcgaacaatctcattgacaatagcgtcatatcctcccggtaccatcgtaccttcctgccatacattccattgcagtactgtaaattcattactcttctgacttcgtgcaaagacggaaacaaatagtaaaagtgtcgtaaatagtaagttggttaatcgcatttcatttattatttagcgtgatgtatctttaaatagctttccagaaagactgaaaatcacggtatttaccgtagcagaccagttcgtctccttcttccaccttttcatctccgggcaactcattcttgacatgacgctccatcaaagaaatgcccaggcaattagtgactttgttcgcacgcttcagtgcgatcagtttcagatgaaactcttcatccatattcagctcattcacaaagtatcctacaaacttcttcggaacagtaaacttcacgacataataatcctgatcaatacggaacgcttccatcgtcgccccaaagtcgagcaactgcaccaggctacgggcagcatcctcttccggtgtcagaatcttctccagactaaacgcttcaagcactgccttgtgcaccgcatcaatggcacgggcaaaaatacgaggcacctttttctgcttcaacaacgcgacaacacgtaccgatgctccaaaattctcgccaatcgccacaacaacaatatctacgctattcaaaggcagcaccgacaacgactgttcgtccgtagcgtctatgacaaaagcagtggcaaccttatctttgattgagtcgacacggctttcgctgatgtccgctccaatgatctcatgccccaatgccgataattcctcggcaagtacatgcccgtaatttcctagaccaataataatatacttcatgatgttagtttatgatgatgttatcactcggataacggtattttgtattctttttctgcttgacgatgcccagcatcaacgtaatcagaccgacacgtccgataaacatcagcaacgataccagcaatttactggcatcgcacaattgaggcgtcagattcaggctcgatcctaccgtactaagggcggaaacacattcaaaggtcagtgccagcaaagaggctttcggttcgagtatgctcaatatgaagatgaagagaaacaatacgcccagcgacatgacgaccgtcgcattggaacgccggatagagtcatgagacaattccctgccgaagacctccacccgctcacttccccgcaatacggctacaaggttcaacactaccactgcaaaagcattcactttgacaccgcctgccgtagactgcgaaccgccgccgacccacatcaggaagagataaaccaacagcgtctgcacgctcaatgatgccagatcgacactgctaaacccagccgttcgcggacaggtcgcattaaagaatgcttgcgtccatttatcggccacagacataccggcaaaagaggcattccactcaaaagcagcaatggccagtgtaccgatcagcaaaagcaggaaagtcatgatcaatacgattttcgtattcagattgtagaggtgctgcatcttatgtctttccagtttgcgggtacgcacaaacgtccagaaatggcgcaaatggtataatacgatatctttgaaattaaccagaatcggaaagccgataccgcccaagataatcagtaaagagacggagatgaacagccagttgtggttggtcatcaccatcgaatttcctaaattgcctgaaagtgtggagaaacccgcattacagaaagccgaaatggaatggaaggcggcaaaagccagttcctcttccagattcatcccaagcgtatcgtgaatgctgaaccagatggacaccatgccaatgccttcgatgaccaatgtaaatccaaggatatatagtagcgtggacagtaacgaccccaacgaattggaactgaccatatcacggacaacgagctgattgtaaatggaagtatttcccataaagaacatggcaaagaaactggttaatgtcatcactcccagtccgccgatctgaatgagcaggataatgactacaagtccgctggtggtgaaagtggtggatacgtctaccggcaccaagcccgtcacacagacggcactggtggctgtaaacagagaatcgacccaagtgatgccattgaccgtacatcgtggaagcatcagcaatcccgtcccgatcagaataatagccataaagctgacagccagtatcaaagacggattcgtacggcgtcctaaaagacgcaccaagccattggacaggttcagcagagaaaaaaccaacaataatattaaatgataaaacttcccgtgaaggaattcccagacttgcagaattgctccctcttcttccggacgatggaagatgacgggaaccaaagttaggtaaagcaatacgctcaatatccatgccagccttcgatattgctttttcgtattccggtattccagcgaaatatgcagggtgacatcaattaaaaagataatccatacggctttatacaagatctgtatctgctgtacctcgaccggggacaatggaaaaccatgttcgtaaaccactccgacaatcaacaacagagatgccagataagtgagtgcttctaccaaccccagcaggatacgtacatagggcttgagaagcttattctgatataacagaaatttatgataaatcttcatatcacatttttttattgtcgtatttgctatgccgtgcaaacttaactaaaataacaatcgaattcgattctttgttgacaaaattacacgaatattaaaaattttgcctacttttggcagcagaaaactaataaaccacaataacatgagtgacaaaagaaaacggtatatcctaccggaagaagaaattccacattactggtacaacattcaggctgatatggtgaacaagccaatgccgccgttgcacccgggaacaaaacagccgctgaaagcggaagatctgtatccaatctttgccaaagaactgtgtcatcaggagcttaaccagactgacgcatggatcgaaataccggaagatgtacgcgaaatgtataaatattatcgcagtacgccgcttgtacgcgcttacggactggaaaaagcgctcggaactccggcacatatctatttcaagaacgaaagtgtcagcccgatcggttctcataaactgaactctgcgctggctcaggcatattattgcaaagaagaaggcgtcacgaacgttactaccgaaaccggtgcgggccaatggggagccgccctttcttatgctgccaaagtttttggtctcgaagccgcagtttatcaggtaaagatcagctacgaacaaaaaccttaccgccgcagcattatgcagactttcggcgcgcaggtcactccttctccgtctatgtctacccgtgcgggaaaagatatcctgacggctcaccccacctatcagggttctctgggtacagccatctcggaagctatcgaacttgcacaaatgactcccaactgtaaatacactcttggttcggtactcagccacgttactctccaccaaaccattatcggtctggaagctgaaaagcaaatggaaatggcgggcgaatatccggacgtagtaatcggttgtttcggaggcggttccaacttcggaggtatctctttcccattcatgcgtcacaacatcctggaaggaaagaaaacgcgtttcgttgctgccgaacctgcttcgtgcccgaagctgacccgcggtaaattccaatatgacttcggtgatgaagccggatatactccgctgctcccgatgtttacattaggacacaacttcgctcctgcacatatccatgcaggcggtcttcgctatcacggtgcaggcgtcatcgtctcccaattactgaaagacaatctgatggaagcggtagatatccagcaactggaatctttcgaagccggctgtctgttcgcacaggcggaaggtattattccggcaccggaatccagtcacgcgattgctgccgctatacgcgaagcaaaggcgtgcaaggaaacaggagaagagaaagtgattctgttcaacctgtccggacacggtctgatcgatatggcatcttatgacaaatatctggcaggcgatttagtgaactacgcactgactgacgaagatattcagaagaatctggatgaaataggagacttatccaagtaagccccggtttctgaaccgaattctgtaagcataaaagcccggtatgatgccgggcttatttattatctctacgaaactatccaaaagaatacagtcttttgtactttattcatggggtatttaaaggaaattactatctttggcgtcattattaatctcgtgaactaataatgagcaagcttaagaagatagtaatctacttgtttttcctatgcttaggaatgcattccgccttttctgaaactccggaacaaatcacattttcctatatttccatcaatgagggactatcacaaagtacggtgttctccatcgatcaggataaaaggggcaatatgtggtttgccacttatgacggagttaacaaatacgacggatatgcatttacggtttatcagcataatgaggatgacccgaacagtatcgccaacgacatctcccgtattgtaaaaacagacagtcagggacgcgtatggattggtacacgtgatggtttgtcccgttatgatgaggaaaaagacatattccagaacttcttctatgaaaagaatgggaaacatttgcaagttaacggtatcgaagagatctcaccggaacagttacttatcagtactccggaagggctgatcatgttcgatatcaaagaatccaaatttatagatgattctttcagcacagcgatgcataagacaatcgcctccactctttacagacagggtgaccaaatttatatcggaacttcgaccgacggactctatacttactctattactcagaaaacttttgaaaaagtgatccccattttagggactaaacagattcaggctattcttcagcaatcccctacccgcatctgggtggcaaccgaaggagccggactgttcctgattaatccgaaaacgaaggaaataaagaattatctgcattctccttccaatccgaagagtatcagttccaattacatccgctcactggcaatggattcacaaaaccgtttatggatcggaactttcaacgacttgaatatttatcatgaaggtactgattcttttgcctcgtacagcagtaaccccgtagaaaacggcagtctgtcacaacgttcggtgcgcagtatctttatggattctcagggcggtatgtggctgggaacttatttcggtggtctgaactattatcaccctatccggaaccgcttcaagaatatccgcaatattccttataaaaactcgttaagcgacaatgtagtaagctgtattgtcgaagataaagacaaaaacctgtggataggaacgaatgacggaggattgaatctttataatccgattacacagcgatttacatcttatacactgcaagaggatgaaagtgcaagaggcatcggttccaacaatatcaaggcggtatatgtagacgaaaagaaatctttggtatatataggtactcatgccggcggactgagtatccttcaccgcaacagcggtcaggtagaaaactttaaccaacgcaacagccagctggtgaatgagaatgtctatgccatccttcccgacggagaagggaatctctggttgggaacactcagtgcactggttcgttttaatccggaacaacggagttttactacgattgaaaaagagaaagatggcactccggtcgtctccaaacaaatcacgacactattccgcgactcccataaacgcttatggatcggtggagaagagggactatcagtctttaagcaagaaggtctggatatacaaaaagcatccatacttccggtttccaacgtcacgaagctctttacgaactgtatttacgaggcttccaacggaatcatctgggtaggtacacgcgaaggattttattgtttcaatgaaaaagacaagcagatcaaacggtataacacgaccaacggtctgccgaataacgtagtatacggtattttggaagattccttcggaagactctggttaagtaccaaccgggggatttcctgctttaatccggaaacggaaaaattccgtaactttacagaatcggacgggttgcaaagcaatcagttcaataccgcttcttattgccgtacatctgtgggacaaatgtattttggcggtatcaacggaatcacgactttccgtccggaattattgctcgacaatccttatacgcctccggtggttatcaccaaactgcaactgttcaataaggtagtccgcccggatgatgagaccggtattctgaccaagaacatcagtgaaacgaaaagtatcacactgaaatcctggcaaactgctttttccattgagttcgtggtatccaattatatctcaggacaacataatactttcgcctataagctggaaggttatgataaggaatggtattatctgacggacagccgcaccgtctcctactctaacctgccacagggaacctaccagttccttgtcaaagcagccaacagcgatggcaaatggaatcctatccctacagcattggagattatcgttctgccaatctggtataagacctggtgggcactactcatcttcttcgcaaccttcgcaggtttcatcacttttgttttccgcttcttctggatgcgcaaaagtatggaagcccagcttgaaatagaacgcagagacaaagaacatcaggaagaaatcaatcagatgaagatgcgtttcttcatcaacatctcgcatgaacttcgtacacctttgacgctgattctgactcccctgcaagagatcattaacaaaatcagcgaccgatggacacgtaaccaactggaatatatccaacggaatgcaaaccgcctgctgcatctggtcaaccaattgatggactaccgccgtgctgaactcggagtgttcgaactaaaagcgaaaaaaggaaacgctcatcaactgatacaggacaacttcctcttctacgataaactggcacgtcacaaaaagattacttatactctacactctgaactggaagacaaagaagttctttttgatgccaactatctggaactgatagtaaacaacctcctttccaatgcctttaaatatacggaaagcgggcaaagcattaccgtaactctgaaagaggagaacggctggctattgctacaagtcagcgatacaggcataggtatccctatcaacaaacagggaaagatattcgaacgtttctatcagatagaaagtgaacacgtaggaagtggtatcggactttcgttagtacaacgtctgatagaacttcatcatgggcgcatcgaactggacagcgaagaaaacaaaggcagtacattctctgtctatctgccacaggatctgtcggtttacaaaccttccgagttagcttccaataacgaacagaatgaagaagagcaagtgtattctaccaattcgaaagcaatgtatttcatcgacacggagaaagtggaaaacgaatctgtggaatccggtgataagaagcgcggaacaattctgatcgtagaagataataatgaaatccgccgttacctgagtaacggactggcggatttgttcaacacactggaagccgggaacggtgaagaagcactggaaaaactgaaagacaacgaagtggatgtgattgtcaccgacgtcatgatgccggttatggatggtatcaagctatgcaagaacgtgaaacaaaatatccggacttgccatatcccggttattattctctccgcaaagactgatatcaaagatcagatggaaggtctgcaaatgggtgcggatgactatatccccaaaccattctctcttgccatcctgacaaccaagatacagaacatgatgcgtacacgcagacggatgctcgataagtacgccaaatcattggaagtagaacctgagaaaatcacattcaatgcaatggatgaagccttgctgaaacgtgccatggcgattgtggaaaagaatatggataacatcgaattctctaccgacgaattcgccagagaaatgaacatgagccgttctaatctgcatttgaaactaaaagcaattaccggagaatcaaccattgactttatccgtaagattcgtttcaatgaagcagccaagctactgaaagacggacgatatacggtagcggaagtcagtactatggtaggattcaatacaccgtcatattttgccaccagtttcaagaagtacttcggatgcttacctacggagtatatcaagaaatcaaaaggatagtagttagacatacagtatagagtcttttatagcaatcgtgttttttgtctttttccgaaagaaaaatgcacctgccttgtaccatataccacatttggtatcgcactattatacctcaaaacacgtttttttcttcttttattgaatgatgacggactttaaaatcatccatccaaacaacctaaattgtacagaacctattccatatcatattacaatccataacattatgacacataaaaaactaaaatacaggagataaacagctcttttaaacaaaaacaacatatgtctcaacaaatttgatatcaaaaaaatcatttttgaacaaagtatgaacaacctaaattaaagaatctaattaatgaggctacatttgcaacagtaaaataacacttttaataattataaaacctaataaagtatgaagaacatcttctttatttgcttttgtgcgctattcgcatttagtggatgcgcagacgatgatgatgatctattaaccggagggaatgtagatatagatctgcttcctgatgccaaaccaaacgatgttgttgatcctcaagtattcgaggctattaacctcaactaccccggactggaaaaagttaaagaattctacgaggcaggcgaacattattatgcagccaatgctttattggaatactatagaacgagaaccaatgttactaatccgaacttatctttaattaatgtgacgatctcagaagcagagcaggcaaaagctgattatgcactggtagattatcgctttcatgttaacaacttctatgaagataaggaaaccttgaaaccctattcagtaaaacaagacggaggtataaactgggagtattcaccgaaagatgcatctgatgaatatcagaaacaacttcatcgccatcagtggttcatcccccaagccaaagcttaccgtgtaagtggagatgagaaatacattcaatcatggattgaggtatataagaattggatagaaaacaatccgaagcctacaacaggacctaatactacctcatggtggcagttacaggtatctacccgtatcggtgaccaggtacaattgcttgaatacttcaagaactctgttaattttactccggaatggctttctacattcttggtagaatttgcagaacaagcagattttctcgtagattatccgtatgaatcaggaggtaacatacttatatcacaagcgaatgcattggctactgccggaacgttaatgccggaatttaagaatgcggagaaatggatgaatacaggatatcagatacttagcgaagaagtacaaaatcaaattatgagtgacggatggcacaaggaaatgtcgctccactatcatatcggtatcgttgcggatttctacgaggctatgaaattagcagaggcaaaccaactctccagtaaattgccgtcagattttacagaaccactgcgtaaagcagcagaagtagtgatgtacttcacatatcctaattactttatcaagggttctgataatgtggtcccaatgttcaacgactcatggagccggacacgtaatgtccttaaaaatacgaactttaagcaatatgtggaaatgttcccggatagtgaagaattgaaatatatgcaaactgccgggaatggtggaacagcacagggacgtacccccaataatgatatgaagctattcgaccaggcaggatattatgtattacgaaatggttggacaccggcttctacagtcatgattttaagcaataacaagagtaatgatgcttctaattcacttagtgcctatagtcataaccagccagataatggtactttcgaactataccataacggacgaaattttttccctgattcaggtgtgtgtacttattataccagcggtggagacaatgacttacgttactggttccgtggtatcgataaacacaatactttatcaatcggaaaacagaatatcaaaaaagcagcaggcaaactgttgaaatcagaggaaggagcgactgaattagttgtatttgagaatcaaggatatgataacttaaagcaccgtcgtgcagtcttttacgtaaacaaaaaattctttgtattagtagatgaaggtattggaaatgcagaaggtactattaatctaagtttcaatctttgcgaaggcactgccagcgaaattgttatggatacagataaaaatggagtccatacagcattcagcaataataataacattatagtccgcacttttgccaataaagcagtaacctgttctccattcacgggacgtatagcctatctcgtagacggggcttacaacacacgtcaatcttacaccatcgatatgaataagagtgctgatgaaaccgcacgttatattacagttatccttccagtcaatggaagtactgatacatccagtatctcagccaaattcatagatagcggatatttcgaaaacagcgcttctgtagaagtaagtgtgaatggagagacacatacattatcttataccttataaactaataactcttaaaatatgagatctaaattactaaacattacttcaagattactaggagtcctcatagtaattgcagtgacaatagtcaatagttcctgttcggatacagaaactactgactctacgaagtttaccatttattatacaggaatgactgatatcggtccatctatgacaggagttatcagtagcccgacttacaaaggcagtgctccatacgattttgccattaccagaatcactcttgatggagaaccgttttccgatagcatcttcgccattgattcggaaacaggaaaaatcactttaaatagtacaagcaatactcctgtcggcctatacaaactatctgtcgcatgttattccaacaataacagatatgaatataccgacattgtggaaatcaacatgatgaaacctgtgcctgatggaatcaaaacagatccggagaaactgcaggtagaatatgcagatattatcgacacagaaaacagcaatgaactgcccacctctcaaattagaactgaaggaaatcatatttctatttcaaactacaccattgcttctgcaatgtggaatggagttgcagtagaaagtcccgaagactactttgccgtatcagataaaggtgaaatttccatcatcaaaggaaatcaaaacattcagcctggtaagtacatcctatcattcaaactgacaactgccgcaactggagaggatcctgaaaaaggaattttcgagaatgcgctggaaatcaatgtaacttcccgcccactttcattaatatacactcctgatgaaggaaaaatagaggaagaaggagagcgtagtcctgagaccactttccaaagtaatattcccgcattaaaaggttctgcggaagggcttgtatacagtatcagttcagttagtccgaatacggataaaatcacaattgatccgacaacgggcgtattgtctgtagcggctcatcatgaattcaaggatggagaaaaatatcaaatcagtgtgaaggctatcaatgaattttccccagaaggcgtagtattcgagaatgtattcacactaaatacagttgaatttatagaaccgatagctaacttcggatacgctgatgtaaacaatgtacaagctgtagaaatcgacattaacaaaaatgagaatttcaaaggtgatgaagtgaaatatgaatttgtaaatctgccaactgaccttcaaggtgaattagctcttgatctgaatggaaacatcgccattaagaagggaaacaaaattcctgtcgggcaatatacagttcaggttatggctaccaataccaaaggttcagagactgctacatttacattaacaatcacagcaaatccgaactattttacttatttccgctacggaaataacctcggattaactcctattgaaaactatgccgatcaattcagaattgaggcaggcggtaaacttaactctgtaaaaccggttccaacagcaacagatgccaaagatggtttgtcttcactaaagtgggaagtagaattgaaacataatcccaataatacaaaagcgactattaatgaatctaccggacagattacaataaccggattaaaacaaggacaatgtggcatggtaatggttaccgcaacagccggagaaggaaaaacggcagtttctgtaaaacaacctgtatttttccatttctcaatgatttcagacagtaatgtacaattagagtatactccgtttgtcttccaggtaaatccggcaagaggtggtgagtcaatagctccaagtttaggagcaggtatagataaatctacattcagattagactatcgccgtgacttcttctactataatatagcaggtccggattcacatataagcggggcattggcacaaaaagtagataacttcttatcggaaatgtggaattcttatgatgcgacagccggtacatccagaaaaccgatgtcttactttgaaaacactactaatttaagcaaagcgttaggttacattgaccagacagacttcaaagtacacattaacccaaatctgtggcgcaacaaagacggctacgctaacggggccatgattggtcagataacctatgacgtcaccggaaaagatccacaagctgcaacaagcggggcacgggtttctccgatatttatttggtttgatactaagttctaataaatacatgcaaaaatacacgttatgtactatacaaatataataaaatcaattagcgcaagagggttgttcaccctcttggcactgatcatatcgatcagcttacatgcccagaacgctactgtaaaaggtgttattgtagatgaaacagatactcctctcattggagcaactgttcaggttaagggaaccgcaacgggaagtataaccgactttgatggaaattacacaatcaaagctaataaaggtgcggttattacattctcatatattggatataagacacaggaaattaaattcacaggtcaatcgccgcttaacgtaaagatgattcctgacaatcagacactagatgaagtggttgtagtaggttatggtactatgaaacgcagtgacctgacaggttccgtagcttctatcgccgccaaagatgtagaaggcttcaagacaagttctgtagcaggcgcattaggaggtcagattgccggtgtgcaaatcacttcaactgacggtactccaggcgctggcttcagcatcaatattcgtggtgtcggcacattgacaggagattcttctccactttatattgtcgatggttttgaagtagacgatatcgactatttgtcaaactctgatatcgaatctattgaagttttaaaagatgcttcttcttccgctatctatggtgcgcgtgccgctaatggcgtggtattaatcacaaccaaatccggtaaaactggaagaccgacaattacctacaatggttcagccagttatcgtaaaatatctaaaaagctagacgttctttccccatacgaatttgttaagttacaaggagaagttaattcaaaatattcagactcctacttcaagccgggaaatgacgataatgatattccctaccgttatcagtcacttgatgactatatgggtgttaaaggtgttaactggcaggatgaaacattcaatcctacctggtcacaagaccatagtttgtcaatcatgggaggtacagatgattctaaatacaacgcatcattctcacgctatattgaaaacggtattttcaagaacagtggtttcgataaaactacaggaaagtttcgccttgaccaaaagttaagtaaaagtttgtctttcaatatcaccgtcaattatgcactgactaaccgtaaaggtgtaggtacatccgcagactccggtcgtttcaatatgttagcgcagattttaagtgcccgtcctactggaggattaaagctgactgatgatgaacttcttgattcagctattgaccctgaaatgctcgaatctggcgaaagcttggcacaagtgaatccagtgaaacaaactgaatcagtaacaaataccaaacgcgccgaaatgtggtctggtaatggttcgataagctggcagattattaaaggattgacatttaaaactgccggaacctataacaccactaataaccgtacaaatattttctacaaagatggttccaaggaggcttatcgtaacggtcagaagccttatggacgtacacaaatgggacgcgacgtacgttggacgaacttcaataatctgacttggaaacagaaggttaagaaacacaactacgatgttatgttagggcatgaagtttctttcagaagcactgaatatttactaggcgaagcaatggatttcccattcgataacttaggaaatgattaccttggtctgggtgcaacacctagtaaagtagaaagcagctatagcgaaaaaatgttgctatcattctttgcacgtggaaattataactacgataaccgttatttactgacggcaacagttcgtgctgatggctctactgttttctctaacaaaaataaatggggattcttcccttcattttctgccgcatggcgtgtttccgaggaagcattcatgaaagatgttgattgggtatctaacttcaaagttcgcttgggttggggtattgtaggcaatgaccgtatctccaactacctttctatggatctttacgaagctagtaaatatggcgtaggcaacaatacggtaactgtattgactcctaaacaactgaaaaacgctaatttgaagtgggaaggttcaagcactatcaacttgggtgttgacttaggttttcttgataacagattaaatgttactgccgacttctttgtcaaaaacactaaagacttattattagcacagtcacttgcccatgttaccggatttgattcacagatgcaaaacatcggtaagattcagaacaagggtattgaactaagcttaaattcgactaatattcagacacgtgatttcagttggcaaaccaacttcaatatttcatttatcaaaaacacattaaaaggattagcttcaggcgttgaatcgatgtacgcccgctccggattcgacagcaactttactgcttatgattatattgctactgtaggccaatcactcggcttgatttatggatatgaattcgatggagtttatcaaagttctgacttctatactacgccagacaatcaactgatattgaaagaaggtgttacaaacaatgcacgatatggcactgtgaaaccaggagtagttaaatataaagaccaagatggcgacggcataatcacgaccaatgaccgcacggtaattggtaacgctatgcccaaatggtttggtggtattacaaatacatttgactataaaggtatcgacttcagcttcatgcttcagttcaactatggcaatgacatatataatgcaactcgtctatattctacacaatccagaaacggacgtagaaatatgctggctgaagtagctgaccgttggagcccgacaaatacttccaacctggttccttcacaggatggatatattgtaaatgatgtatattcccgctttatagaagacggatcattcttacgtctgaagaatgtaactttaggatacactttgccgcacaaatggactcgtaaatttcatgtatccagactccgtttatatgcaaccggtcagaatctgttctgcgtaagcggatatagcggctatgacccggaagtaaacagcgcaagcaataccccgatgactccgggactggactggggtgcttatccaaaaagtagagtatttacatttggtatcgatcttcaattctaattcataaaacatatcacatgaaaaaaataatatactatatagcaatgtcggtaatgtgtttgcttcctttttcttgttcacttgaggaagaaaccagaactgaagtagaaaagaaaaactacatgaacaatgcggaggaagcaaaagacgtattgcttggagtttatcgtacaaacactttagatgccatgtatggatattacttatccatactctttaacttgggaacggatatttcacaagtggaaggtagcggtaatgaaaatttccgtatcattccgacaaactcattcccaaccactcagtctgaagtacagcaaacatgggcagcactttataccggtatttacagagcaaatgattttctggaacgtatctcaaataaaataggatcatatactacaactgacaaaaaactcgccaccttatacattgcggaagcgagagctttaagaggtatgttctactttgaattagtacgccgatttggaaatgttgtcttaatgacaagtactcagatgtcaaatcagaatccggctacatatgtacaatcagctccagaaaaggtatacgaatacatagaagacgacttgttgtacgcttgcgacattttaccatatgcgacagatgaccaatatcgcgaaagcaacgactatcgtttctcaaaaggagcagcattaggcttattgaccaaagtttatgctacctgggctggctatccggtaaaggatgaatccaaatgggaagctgctgcaaaaaccgcacgcattttggtagaatccggcaaacatggactgttgaaagattacgaacaactatggaagaatacctgtaatggcacttgggacccgactgaaagtttgattgaaatatcattttactcaccgacagtatcaggcaacagtgatccggtaggacgtatcggtaagtggaacggagttaaaacaaccgctattgcaggtgtacgcggaagttgtgcagctaacgtaaaagtagttcatacatttgtgcttgactggagagaagatgtatcggatatccgtcgtgatttatctatagccaactaccaatatactgacacaaaaaaatctctttgggtagccggcgccagtgatacagatgaaagtgcagcagagaaagatgctgatcctactaaagctcagaaaaataagcaaaactatactcctgcaaaatgggatattcagaagtatgtaacaacaaatagtttcatcaacaatgataaatctaatgtgaactggtatttcttacgctatgcagacgtattattgctttatgcagaagtattaaacgaatggaaacatggtcccgatgctgaggcatataatgcaatcaatgccgtacgtcgccgcggttatggcaatccaagtaacacaagcgcatgcgatctgccacaaggactcgatgaaacaagttttcgtgaagcagtccgcaaagaacgcagttatgaattatcatttgaaggacaccgtcgtcaagacctaatccgttggggtatttattataaaacagtgcaagcgaccgctaaagaattaggttattggtgggaaggtacaggatcaccaaattattcagtagccacttatacagaagaaggcaaacatgagctgttccctattccacaacgagacatggacttgtgcatccaatttaatcaaaatcccaaatggtaactgaataaaactctctccaatatgcttgtgacacggcatattggagaatattaaaatcattttcgacaaattcaaaactagaaaagcaggtattgaatgccttttaaacaatcctatcacataatttaaacccattcatctacttttgcatcagttacaaaacttctaaaaacaatcacttaaaatgaataacatgaaaaagaaacttgttctctttgcttcggttgccattgcacttgcatcgtgccagacaactccaaaggaagactacagttggattaagaaagggctggatgtagcttctgcccagttacaacttacagcagaagaaattgacggaaccggtaagcttccacgttcaatccgcaccggatatgacatggatttcctctgccgccaattagaaagagatccttccacttttcaggattcacttcgtccgcaacctactgccgaacaaatgggcaaacgtcgtttatgtgtagtatacgactggacaagcggtttcttccccggatcactgtggtacgcatacgaactgaccggaaatgatacactgaaagcggatgccattcaatatacaaacctgctgaatccggtacgctattataaaggtacacatgatttgggatttatgatcaactgcagctacggaaacgctgagcgtctggctcctaacgataccatcaaagctgtcatgaaagaaactgccgataacctgagcggacgtttcaacgattcaatcggagccatccgttcatgggactttggcagctggaacttcccggtaatcatcgataacatgatgaatctggaccttctgttcactgtaagcaaatggacaggcgacaacaaatacaaggatgtcgctatcaagcatgccatcactacgatgaaaaatcatttccgtcctgactatacttgctggcatgtagtaagctataacaacgacggcacagtagaacgcaaacagactcaccagggtaaaaacgacgattcttcatggtcgcgcggacaggcttgggctgtatacggatacacttcctgctaccgcgaaacaaatgacactaccttcctgaactttgccgtaaacatagccgacatgatcatggagcgcgtgaaaacagacgatgcaattccttactgggactacgatgctcctgtcaccgaagagactccacgcgatgcttcggctgctgctgtaacagccgcaggattcattgaacttagcacaatggtacccgacggaaagaaatatctggattatgcagaaaaaattctgaaaagcctttcaagcgacgcataccttgccaaagtcggcgaaaaccagggattcatcctaatgcactctgtcggatcattgccgaacggttctgaaatcgatactccactgaattatgctgactactactatctggaagcattgaagagattcatggacttgaagaagttgaaagtggagaatggagaggtgagagttattgagtaacatagctgagaaaattcaaatctaaattgtaaattgcagaataataaatgatatcatgaataaaaccctgaaatatatcgtcctgctgacatttgcttgtttcgtaggcaaaggctatgcccaagagttgaaaagcgaggtattctcgcttctcaacctggactaccccggattggagaaagtaaaagccttacatcaggaaggcaaagatgaggatgccgcaaaagcactgctcgactactaccgtgcccgtacgaatgtgaagacgccggatattaatctgaaaaagatcactatcggcaaagaagaacagcaatgggcagatgacggattgaagcatacattctttgttcacaaaggctatcagccttcttacaactacggagaagatatcaactggcaatactggccggtaaaagacaatgaactccgctggcagttgcaccgtcataaatggtttactccgatgggtaaggcataccgtgtatccggtgacgagaaatatgccaaagaatgggcataccaatacatcgactggatcaaaaagaatccgttggtgaagatggacaagaaagaatacgaactggtaagtgacggtaagattaaaggcgaagtggaaaatgtgcgtttcgcatggcgtccactggaagtcagtaatcgtctgcaggatcagactacacagttccagttgttcctcccctctccttctttcactccggatttcctgactgaatttctggtgaactatcataaacatgccgtacatattctggctaattactctgatcagggtaatcacttgttgttcgaagctcagcgtatgatttatgcaggtgcattcttcccggaatttaaagaagctccggcctggagaaaaagcggtatcgacattctgaaccgtgaagtaaacgtacaggtttacaacgatggcggtcagtttgaacttgacccgcattaccaccttgctgctatcaatatcttctgcaaggcactgggtattgcggatgttaacggattccgtaatgaatttccacaggaatatctggataccatcgaaaagatgatcatgttctatgctaatatttctttcccggattacacaaatccatgtttcagtgatgctaaaatcacagaaaaaaaagaaatgctgaagaactatcgtgaatggagcaaactgttccccaaaaacgaaactatcaagtatttggcaacagacggcaaagagggtgcattacctgattatatgtcgaaaggtttcctgaagtcaggtttctttgtattccgcaattcctggggaatggatgctacacaaatggtagtaaaagccggtccgaaaggtttctggcattgtcagccggataacggtactttcgaaatgtggtttaacggcaagaacctgttctccgactccggttcgtatgtatatgcaggtgaaggcgaagtgatggaacaacgcaactggcaccgtcagacttccgtacacaacaccgtgactctggacaataaaaatctggaaacaaccgaatctgttactaaactgtggcagccggaaggcaatatccagacattggttacagaaaacccaagctacaagaacttcaagcaccgccgttcggtcttcttcgtagacaatacctactttgtcattgtagatgaagtatcaggcagcgccaaaggttctgtcaacctgcactatcagatgccgaaaggtgagatagccaacagccgcgaagacatgacattcctgactcaattcgaggatggaagcaacatgaaacttcaatgcttcggccctgaaggcatgagcatgaaaaaagagccgggatggtgttctactgcatatcgcaagcgctacaaacgtatgaatgtttcattcaacgtaaagaaagacaatgagaatgcggtacgttacatcacagttatttacccagtcaagaagagcgcagatgcccctaaatttgacgctaagttcaagaacaaaacgttcgatgaaaacggactggaaatagaagtgaaagtaaacggcaagaaacagtcattaaaatataaattataatccagtgaccagcgaggcactgagaccagatttccatgcggatatatgcccgctacggaaaaggcctcggctcctcactggtcattttttatcatcagatgttatttctatcatgaaaagcaatccctctaccttactgcttccattggctgcactaagcctcgcttcctgtgccaaccagaaaaaagaagaaaccaaacgtccgaacatcatcttcatgatgaccgacgaccataccacccaagctatgtcctgctatggtggcaacctcatccagactcccaatatggatcgtatagccaatgagggtatccgttttgacaattgttatgcagtcaatgccctttccggtccttcacgtgcctgcatcctcaccggaaaattcagccatgagaacggctttaccgataatgcaagcaccttcaacggtgatcagcagacattcccgaaactacttcaacaagccggttatcagactgccatgatcggtaaatggcatcttatcagcgaaccgcagggatttgaccactggagcatactcagcggccagcatgagcagggcgactactacgaccctgacttttgggaagacggaaagcacatcgtagaaaaaggatatgcaacggatattatcaccgacaaggcaatcgatttcctcgaaaaccgcgacaagaacaaacctttctgcatgatgtatcatcagaaagctccccaccgtaactggatgcccgccccccgccatctgggtatattcaacaatactattttccccgaacccgcaaacctgttcgatgactacgaaggacgcgggaaagcggcacgggaacaagatatgtcgatcgagcatacgctgacgaatgactgggacttaaaactgctcactcgcgaagaaatgctgaaagatacgacaaaccgcctgtatagcgtttataagcgcatgcctgtagaagtacaggacaaatgggattccgcctatgcacagcgcattgccgaataccgcaaaggcgacctgaaaggcaaggcattaatcagctggaaataccagcaatatatgcgcgattatctggctaccgttctggctgtagacgagaatatcggtcgtctgctgaattatctcgaaaagatcggcgaactggacaataccattattgtctatacttccgaccaaggattctttctgggtgaacacggctggtttgacaaacgattcatgtacgaagaatgtcagcgtatgccgcttatcatccgttatccgaaggccattaaagctggaagcaccagcaacgccattagcatgaacgtagacttcgcccccactttccttgactttgccggtgtagaagtgccatctgatattcagggagcatcactgaaaccagtattggaaaacgaaggcaagactcctgccgactggcgtaaagcagcctactatcattattatgaatatccggcagaacactccgtaaaacgtcattacggcattcgcacgcaggacttcaaactgattcatttctacaacgacattgacgaatgggaaatgtatgacatgaaagccgatccgagagaaatgaacaatatcttcggaaaagcggaatatgctaagaaacaaaaagagttgatgcaactacttgaagaaactcagaaacaatataaagacaatgatcccgatgaaaaagagacagtgcttttcaaaggagacagaagactgatggaaaatcgataaataacccaaaacaatcatatcatggacagaagaaattttataaagaatactggctggtcttttttaggactggcagcatccggcagcctgctcggctcttgtgcggcaggaagtaaagaagccaaaaagaaaatgccatcggcaagtgacctcaaaatgtactggggagacctgcacaaccattgtaacatcacatacggacacggcgatatgcgcgatgcttttgaagcagcgaaaggacagttggattttgtaagtgtaacaccccacgccatgtggccggatatccccggagcagacgatccacgcctgaaatgggtaatcgactaccataccggtgctttcaaacgtttgcgcgaaggcggatatgagaagtacgtagccatgacaaacgaatataataaagaaggagaattcctcactttcgttggatatgaagcacacagcatggaacatggcgaccatgttgccttgaactacgatctcgatgcaccgcttgtagaatgcacttccatcgaagactggaaacaaaaggccaaaggacacaaagtattcatcactccgcaccatatgggctatcagggtggttatcgcggctataactggaaatgctttaccgaaggagaccaaaccccgttcgtagaaatgtattctcgtcacggtctggctgaaagcgatcagggtgactatccatacttgcacgatatgggtccccgccaatgggaaggaaccattcaatatggtctggaactgggaaataaattcggtattatggcttctaccgaccaacattcgggttatccgggcagttatggcgacggccgtatcggtgtactggctccgtcattgacccgcgacgctatatgggaagcacttcgcacccgccacgtatgcgccgcaaccggcgataagattttgattgacttccgcctcaacgacgctttcatgggtgacgtagtacgtggcaacagccgccgcatttatctgaacgttaccggagaaagttgcatcgactatgtggatatcgtcaagaacggtcagattctggcccgcatgaatggtccgttgactccggttgcccccgaaggtgatactgtccgctgcaaagtgaaagtagattttggatggaaccgtgaagaacagtatgtacactggcaaggtaaattgtctgtagacaaaggacgcattctgagcgtcactccatgtttccgcggtgcagccttcacttctccgcaagaaggagaaacagaattccacactcacgtaaaccgcattgtatccgcaggcgaaaaagaaaccgaactggatatgtacagcagcaagaatccgaatacgactaccgctgctatgcaggctgtcatcctcgaagtagagatgccgaaagacggaaaagtgattgctgatttcaacggcaagaagtttgaacacacattgggcgaattactcgaaggctcacgttcacacttcatgatcggctggctgagcgaagcgattctcttcaatcgtgctatgcccgaaagctgtttcactgtggaacactatatggaagataaagagcctcagcgtgatacagattactactacgtgcgtgttcgccagcgtgacgggcaatgggcatggagttcacctatctgggcagaaagagtataaactggtatatgaaagaaaacagttgctttgcttgtgccaagccgttggcacagttgtgtcaagctgttggcactgctatgccaagcctttggcacaagcgtgccaatacggtggcacaagcatggcacagtataaacgaatttaaaacatacctagttatatggaaaaagaatacgctataggaattgatcttggcgggacttctgtgaaatacgctcttattgataataatggcgtatttcactttcaagggaagctaccgtcgaatgccgacgtatcagccgaagctgtcatcgggcaattagtcaaggcagtcaatgaagtgaaaacctttgccgaagcaaaggaatatacgatagccggtatcgggatagggacaccgggaattgtcgattgtacgaatcgtatcgtattgggaggtgcggagaatattcaaggctgggaaaatctgaaactggcagaccggatggaaaaagagaccggacttcctacccaactgggaaatgacgctaatctgatgggactcggcgaaacgatgtacggagccggaaacggagccactcatgtggtctttctgactgtaggaaccggtatcggtggcgcagtcataattgacggcaaactgtttaacggatacgccaatagaggtactgaattgggacatgtccccttgatagctaatggtgaaccttgcgcctgcggttcaataggatgccttgaacattatgcttccactgccgcactggtccgtcgtttcagcaaacggatagccgaagccggcatctcttatccgaatgaagaaataaacggagaattgatcgtccgtctctataaacaaggagataagattgcggctgagtcgctgaacgaacattgtgatttcctcggtcacggcattgccggatttattaatatcttcagccctcaaagagtcgttatcggcggaggactgtccgaagccggagacttttatattcagaaagtaagtgagaaagcccttcgctatgccatccccgactgtgccgtgaacacggaaatcatggcggcctctttaggcaacaaagccggaagtatcggtgccgcctccctctttttaaatagaaaaccgaattaaatgaagagcagaaaaccttctcaacttatttaagattatgaagaaaaatctaggaatgctggcgctgattatggcgttctggttcactatctcgtttattaccaatattctgggaccgcttattccggacattatccacaatttcaatctgagcgatcttgcgatggcggggtttatcccgacttccttctttctggcttacgccattatgtccatccctgccggactactgatcgaccgtttcggtgaaaagcctgtcttgttctgtggattcctgatgccgtttatcggaaccatcctgttcgcctgtatgcatacttatccgatgttgctagcttcatctttcatcatcggtctgggaatggcaatgctgcaaaccgtgctgaatccgctccaacgtactgtaggaggagaagaaaactatgctttcatcgctgaactggcacaatttatgttcggtatcgcctccttcctaagcccgttggcatatacttatctgattcgggaacttgatcctgccacttatacagcaggaaaaagccttatccttgacttgctggcggatatgacgccacaagatatgccttgggtatctctctactgggtatttaccttattgttgctggtgatgctgattgccgtcggtgtttcgcatttcccgaagattgaactgaaagaagatgagaaaagcggatcgaaagattcctacctcgccctgttcaagcagaaatatgtatggttgttctttctgggaatcttctgctatgtcagtacggaacaaggaacctctatcttcatgagtaccttcctcgaacaatatcacggtgtaaacccgcagacggaaggtgcgcaggcagtcagctacttctggggactgatgacggcaggctgtctggtcggaatgattcttctgaaactgattgacagcaaacgcctgctacaggtttcgggggtattgacgatagtgctgttactagccgctttattcggaagcaaggatgtttcgctaatcgcctttcctgctatcggattcagtatttccatgatgtactctatcgtcttctcattggcgctgaactcggcttcacagcatcacggctcatttgccggaattttatgttcggctatcgtgggtggagcaggcgggccgatgattgtgagtacattggcagatgctacgtccttgcgtacaggtatgctgtctatcctgctctttgtgggatatatcaccttcatcggtttctgggcacgtccgctgatcaacaacaagacaatcagtctgaaagaactcttaaaaaaataagatgatgaaacaacgatattatattttcctgttatttgtagctatgctttcctatagtggatatgcgcagaaaagcatcctgcgtctgagtcagcagacgctgatgcatgaagtccgcgaaacaccttctccactagacggtcagcacatagcagtcaatccgccgcgtttcatgtggccggataagttcccccacctcggacctgtgcttgacggagtggaagaagaagatcacaaaccggaagtgacataccgcatccgtatcgcacgtgatcctgagtttaaatcggaagtaatgaccgccgaaagaaactgggctttcttcaatcctttcaaactctttgaaaaagggaaatggtattggcagcacgcctaccttgataaggacggcaaagaagaatggtcgcccgtctatcatttctatgtggacgagcagacacgtacgttcaatcctccctccttgcaagaagtgctggcgaagttctctcaaagccatccccgtatcctgctcgatgccaaagactgggatcagatcatcgagcggaacaagaataatccggaagcgcagctctatattcagaaagcaaggaaatgcctcaatcatccattgaaacatctggaagaggaaatcgataccacccaagtagtcaaattgacgaacatcgtacaatatcgctcggcattgattcgggaaagccgcaagatagtagaccgcgaagaagcgaacatagaagctatggtacgcgcttatctgctgacgaaagacgaagtgtactacaaagaaggtatcaaacgtctttccgaaattctttcgtggaaagacagtaagtactttgcaggagatttcaaccgctccacgattctgtccatgagtacttccgcttatgatgcatggtacaatctgttaacgcctgccgagaaacagttgcttctcgaaacgatcagcgaaaacgcccataagttttatcatgaatatgtgaatcatctggaaaaccgtattgccgacaatcatgtatggcagatgactttccgtattctgaatatggcagcttttgctacatacggtgaattgccgatggcttccacttgggtagattattgctataacgaatgggtatcccgtctgccgggactcaacaccgacggaggatggcacaacggtgactcttatttccatgtcaaccttcgtacattgatcgaagttcccgctttctattcacgtatcagcggtttcgatttctttgccgatccctggtataacaacaatgcgctctatgtaatctatcatcagcctccgttctccaaatctgcgggacacggtaactcccatgaaacgaaaatgaaaccgaacgggacacgggtcggctatgcggatgctttagcacgtgaatgcaataatccgtgggcagccgcctacgcacgtaccattctagagaaagaaccggatatcatgaaaaagtcttttcttggaaaagcaggtgatctgacctggtatcgctgcattactgacaaggcactcccgaaagaagaacactcattggcagagttgccgatgacgaaagtatttaatgaaacgggaattgctacgatgcatacttcgttgggggatatagaaaagaacgcaatgttgtcattccgttccagtccatacggttcaacttcgcacgcattggccaatcagaatgcatttaataccttctatggcggcaaggcgatcttctatagcagcggacatcgtaccggttttaccgatgaccattgtatgtattcctatcgaaacacccgtgcacacaacagtattctggtcaatggaatgactcagactatcgggacggaaggttacggatggattccccgttggtatgaaggagaaaagatttcgtatatggtgggagacgcttccaatgcttacggaaagatcacagctcctatctggttgaaacgtggtgaactttccggcacgcagtacactcccgaaaagggatgggatgagaacaaactgaagatgttccgtcggcacatcattcaattaggcaatacgggagtgtatgtgatttatgatgaactggaaggaaaagaagcggtcacatggagctatctgctgcatacggtagaacttccgatggaaatgcaggaacttcctgatgaagtgaaagttacgggaaagaataaggatggaggcatctctgttgctcatcttttcagttcggcaaagacggaacaggccatcgtagataccttcttctgcgctccaaccaactggaagaatgtaaccaatgccctgggaaaagctgtgaagtatcccaatcactggcatttttcgtctactaccattccatgtaaaactgcccgtttcctcaccgttatggatacacatggaaataaccgtgcggatatgaaagtggttcgccaaggcaataccgtacaagtaggcgactggattattacctgcaatctgacggagaaagggaaagcggcaatcagcgtcacccatcaagcggaaaaggtttctttgaaatacgatgccggcaagaaggaaggtgcgactatcatcacagatcaagtacaagggaaacaggtcaataaggttctgactgactatttaccggattttgagatataatttctcaattctggcacacaatatggagctattcaatggttattataaacttacgaatagctcctttcttttattgtcttttattgaaggtgacaatgcttattatgccacatttcaagcattaataatgtccatgacaggtattaatatctgacttttcaggtattaacagttgacatctcagatattaacatctgacaactcaaccattaatacctgagatgtgggatataaaaagacagtagatcactgtacctttatcataatgagcattgagtttactactaaaaaattgtatctttgcctatgttggtactctacgcaaacattgaaacctgcataaatgttatatcaacagataaaatttaaatagaataaaagatgaaatacattggagcacatgtaagcgcatccggcggcgtagaattcgcccctgtcaatgcacatgagattggagcaaatgcctttgccctgtttactaaaaatcaacgtcaatgggtgagtaaaccattgacagaagaaaacatccgtcttttcaaagaaaattgcactaagtacaatttccaaacagactatattttaccgcatgacagttaccttattaatttgggacaccccgaagaagaaggattggagaaaagtcgagctgcctttttagatgagatgcaacgctgcgaacaattaggactgaaacttctcaatttccatcccggcagccatctgaataaaatctccatagaggattgtctcgcactcattgcagaaagtatcaacctgactttggagaagactaaaggagtaacggccgttattgaaaatactgcggggcaaggcagtaatttaggaagtgaattctggcaattaagatatatcatcgaccgggtgaatgataaaagccgtgtaggtatttgcctggatacttgccatacatatacagcgggatatgacatagtgaatgattacgataaagtctttgacgaatttgaaaaagaagtaggtttcgagtatctgcgtggtatgcacctgaatgattctaaaaaagaattaggcagtcatgttgaccgtcacgataacataggccagggactgatcgggagtgcattctttgaaagattaatgaaagattcaagattcgataatatgccacttattcttgaaacacccgatgaaagcaagtgggcagaagaaattgcatggttgagaagcgttgaataaacgcttcacttcttttttaataaatattcgccatactgactaacggctcatagagtttctcgatatcctgcgagtccatttctatctgcacctgatcccccggcatcagtttctgccctttgggaggccagtttttccggtcacgatgaacattaataataatacaacgttccggcaggcgaagttcatccacgattttaccatccaggtaagaaccgctcatgacctctaccgataaagtgtagcgggcctcttctttaaacgcaggagaattaatcatatcatcatataaaatcacattgaaaggttttatctgaagcatttccgtgaaatagtaagtcagtcctcccactacaatagaaggataaaagacttccagatgtcccgtaatctcagtaatcagcacaatagcggtgagaggtgtacgtatgaccgcaaccagaaaagcagacatacagatcaacatgatataactgatattttcataagcaatcactccttgctgaaccagaatcaatgcaactatttgccctaaaagccctcctgtcactaatgtaggaatgaaacttcctcccggcagtcctgacgaaaaagaaaaggtactgaatacaaaatgcaacaacatcataccgacaatccaaagaatatgggtatcgggatgcatggcctgtgccaacagaaactgttccccacctcctgtcagattgacttctgccatagagatgagataagcaataaagagcagatatagcatttttacgtattccggatgcttgatggccggatagatacgtttgacctgaagcgtagtgacagaaaagaactttccgaaaacagaaaccacagccgccaaaagaagaaacaactttacctgtgaccagaaagtcattcccggtacaatcgcatcaatctgaaaatacggattgataggaaaaagccaactggcgactcctccggcaacgactcctgccagcaaggtagtaatcgccgtctttggcgcatcaaaccgttcaatagattctataaccagcaatgaggaagccaacggagcagcaaaagcagccgccaacccggcaccggcacccgccgccaacaattgtttccgctcgccggcaagcactctcccccatttagaaaccagacatcctacatacgaaccgatctgcaccgaaggtccttcacgtcccaaagacaaaccggtgcttagcgcaagtattcctcccacaaacttggcaatcacctcaatgaaaggatgtttatacgcaactcttccattgataactccacgtgtttgtggaatacctcctcctgtgatcaacggcatctttttcaccagccaggagacaaatataagaatcccccacattaacagaaaaagaggaaggtaccaataccatttaggatgagaatcaaagaagtcatggcgaagattgaagaagaactgaagcaggtaatgataaggcacagcaataagccccgtcagtaacccgacgaagatactgacaaagtaaagccgcgcatcaatcaatttgagtttgaagatacgccaacgtcctctgtcctttaattttttaatcagtcgaaactccattcagcaaggttttcattgttttcgcatggatacaacaattaataccccgcagaggtttcagactgataaatatttaatcagctttatccttccagcagattcagacgcagaataccatgtatcatgagtcagcatcaactacacgtccggcaaagctctctttgccggactgtgcataggctgccaaaacttatcagtaacaagacacaatgaataatcaacgatactgaaaagaatagatatatctgcctatgcccaatttgtgttgactttagtaaaataaaacactataataaataatacctaatccattatctacttttgagtttgatgaggggtatgctgtctttgtctctggcggtcttgtccgggtttgtgaccttgtcccggtttctgtccttttctacggtcaaactcttttctgaatttattcatattgctcttttcctgctgataaatcttcatgatctgcttttgagacagaatcttgctgaactcattataatacttctcacggatgtccagcatcttacgactctgcgcaaactgatctttcaacattttagcgatttccgcatctgtcataaccggttttggagtttctttggcagtattggcttccgtaccttgagctgcatcttttctcgctctgggtttgaagttcatcatacgacactcacgaagttctttcaggtacttctggtatatcggagtaaacttggctgccgttgcatcatccagcatcagcgctttcaccatctgattggtctgcatctgcatcatctgctccggcgtaggacgctgttttctttctttgttttctttattctgtgcagaaagggtcatctggcttcccaaaaataaagccatcaacactacataaataaacttagtcttcataatcttcacgttttaataattaattgagttattcagtttaaaaatatatcgttttcagagaagctgacgagctcttccaactcctcatctgacaattccttaatccatttatctaccggatctgtagttacattattgttatcgacagccaatatatttgaagcagacggcgtatcggtattcatatagcgaagagacggtgtaaacaaaatcccggccaatactgccgctacagcaatcacagtaggaataatccttttcagccgacgtttcttgcgttgttcgccaaccgtacgttccaatatcttacgctgcgtctcctcaaaaaagttattgggagtgcgataaggtgtccgcttaccaatattgtcaaaatcaaaatccttatccatgatgttacctatttaatatatattcctttatcttatctttcgcatagtgataattcactttcagtgtctcaaccttactatccagaacacgggcaatatcttcatattccagttcatcgtaatagcgcaaattgaaaacgatccgctgcttttccggcaaagtcaatatagcttcctgaaactttacagccagctcatcttcgtagtcgatatagtcagaagctttcagtttactcatcagttcttcctgaacatcttccgctgatatcacttcttccttacgattattcaatagccgaagacactcattcgtggcaattctgtagatccatgtactcagcgaactttcattccggaactgatccaaatggcggaatacacgaatgaagacttcttgcagcacatcttccgcatcttcatgagacaccaccattctccggatataattatatatcggttcctgaaaactgtccaccagcaacctgaatccccgctcgcgatctgaggaacaagcttttcggattttatcttcgtttatcatctattatttctgagctttggttattagaacgccgaaaaggaacgaagttaaatgcacaagagccgattttacatttattaatagaaaagaggaaatatgacattggcatacaaggaataaaaaaacgcctccataatctttttcaagaccatggaggcgctgttaactctttatatacaagccgaagttgactgaaaatcaccagaacttattatgttccgcactatattcaaaacctgcagctttcaactgactgacaatatcttctctgcttacatccatatcttcgcaaagctcatctagcgaagaataacagtcacgcaacttcatattgatgacactgaacagcaccatcggatctttaggcaattccatattctacaatcttttaaaccgccgcaaagttacagcaatcccggcgaatggcaaaacaaatcaagggccgatttcttctattttcaaagagattctttcaatcagcttaccaagctcctcttccagaggtatcacattaaagtccctccagaagtcttcatcatatttgaaattcagatcagagaagatagtacgcgtcggtaatctttctgcccgcgggaatgcagtcacttgttccgtatccactttgcaagtgatcatttcaaaccagatctgcatctgcggactagcagacagcaaccgtcgccgtttcaccttgaaagaaaggtctccacggatatgatgaatataatagataccttgccatggtttgtaggaaatagtataaaccaccttttgcggtattatctgaatgccatgcgtgcgcctttctacaaacatttccgacgctttctttacacgctggggatctacctcaaaacgagcttgtaacaaggcattcgtctcggcatcaatatacaaatctccgcaatagagaggctcgataatctccttcttttgtgcaaagtgtatgacattcacacaccggtcgtctatgaatgtcactccctgcgaagtatacagataaccgttatcacctgcgtcaggtatcaggaatgaaggcatatccttcattatatccatctgaaaacatgcctgaatgccggacttcacctttacaagcagactgtctttggcttcgacattactcagccgactcatcttcaacagcttcgcctgatcggaaacgggagaatgcgaagcgatcttataaactttgaaaactgcttcagtaagattctgaaccttatttttcaataaaactccttcacggtaaaatgtggtcaggtaggcaggagaatgagaatagttctgctctctttgccttcccatttctttcagcagcttataaggatcgacccattgaaccactacttcctgtaaaggaacaacctttggttccaagctcagaatatgatggcgacctgccaaaacagaaacttccaaagtttgtgaaacatatcctatatgagaaaaaacaaccgaatcgttttgcaaagaatccggtaaggaaagtctgaactctccttcctgattagtaacaatccccacagatgtcctccggactccaacggatgcagaagcaacaggcattccggtttccttatccagtaaagttccggtaagcatcagatttacagggtgaacggatgaaggtttcgcctgttgctgtttggtcggtgaagaagaagttatcagaatatgagtccctattactttaaattccaggctggtatctcctgttatctcataaatagcctgacgaatggttcgctctcctttccgtatcttcaccgttacatcattatctactactttactgtcatagataaacagataacctgactgctgagaaatattgcctaacagtgaatagaccgttcctttcatcttcggcaggctgatcatacgctccagcacatcttctccgtcagctctcaacgtatccggtacgataaagaacaaacacagaatcaccatatagcgataaaccagcctcatctcacttttttttatttattctgtcagcatgaatgtatccccctgccgtgtgcacttcaaattaagcgcataggctatcaatgtagccacagtctctggagattcattggaaaattcaactgtcagctttcttttttcaagcgcaggagaagctacacgtatctgcgaactgcctgcattcatattcattactttcagaatatgccccaaagattcatctttaaaacagacatgcttcagatagcgattcaactctccggcattttcagtcgaactgagcaaaagttgctgtgattgcaataccactgtctcaccagctttgacataacattctttatttccctttttaagggttactctgacggttccccgttgcaccgagagacggaacggagtatctttgacgctctttacactaaaagcagtacccaatacttcaatctttacttcctttgtatcaatccaaaaaggttgcttctgtttctttgccacatcaaaaaaggcatctccctgcaaactgacttcccgtttgtcggaaacaaaatgttccggatatcggatagaagtctcctttgccaaaaacacgacagaaccatcttccagagtcgtgaccaatgtaggaacatcttgattctcctgtgttataaagtcaggtaattcctctttttgaccgaatccccaatacaaagtactaaaaaccaaaccgaccaccatcgccgctacagtgccatagcgtacccacatcgggattttaggcatccgatggtcttctacaagcagatgatctttatccaatcggtcgtacaaccgattccaagcctgctccgtctttattttatgaatatccgttttcatcatttcatttgaatataattttctatttcttttcgcaaagttcgtaaagtcttcgtcatttccgcttccaccgttttgacggagagagaaagctggactgcaatttccgcatatttctttccctccgtccggtgcattttaaatatctgcattctgcgttccggcaatttctcaagggtattatttatcagcttctgaagttcttcatattccatctgctgatgaggatctgtcacctgttccgaagaagatgcagtcagcacagactctctataccgctctttgacctcttcatgctcacagtattgaattgactgattacgtgtcgccctgtagaggtagttttttacagactggaaaatctgtaactgttccctatccttccaaagcacataaaacagttcctcaacaatttcctcagccacctccatccgtccggtaatgcttgccgcataccaacacaagggagaatagtaacagcgaaatagttcctcaaacgcttttatgtcacctgcctttatttttgtcagtatgagcagttcattcagcatacttctatcattttacgattgttcccaaatataagaaaacaattctgattttaattagattgctttttcaatttatcgacagcatgttccagagactccgtaggtgctatgatattataatttccccagaagtcttcactccagtaatttccgactttatcatagaaaatctgattggaggtaaatactttattccgcggaattatctcggacggactctccctccgatctgtcaccaccatttctgaggttactgcatagctcgtagagaaaagcctccgtttccagtcgcatttaaaacgaatatcattgcggatataattcagataagtccttccatctatcgttttataggttatcagaatagataactcttgcggtttgaatctcagtccaaatggtttctgatgaagaatagcagcaattgctttcgatttattctgcatatccagattcatctcgatacgtgtaaacgacagcttatcacaatctacatacaatttcccatgaaacagcgcatatggtaaaagaactctcggacggaaattaataacatattgtatccggttatcgatcaatgccgattcagccatccagaactcatagttgttcaattcttctggttccagcagcgcctctttattctttacgatatccaaaactacagatatattaggaccacccataacctttactgccaatgtatcactaactttctgacttagcagacggcgtcctttcagaacctgtagtttatcataatccgtagtgcgattggtgtatgctgttttcgacacatcaagtacagcttccgatacactgatataacggcgccctttctgcacagtctcccgatagaagctggtaagcatattccggttggcactataatttaccggaatcttctcaatcgccttttctataattgtacgcggattattggcataaacgaccacttcattcaactggttagtatgaggtatcatccagaccgtcaatttagaagaattattcttatctaaagatacatgactattgatatagcctatgtgagagatttccaactctcgcggcacttcttctttcctgactttcagagcaaactctccctctgcatttgtcaccgtaccgatattacttccttgcacagatacattcacgttttcaagtgttctcttattttgcttatccttcaccattccgacaatcgtgaaataatctcctgcatcctgcgcccatatatcagcactccctatccatagaaaagctaataaccatccaaccaaaagtataactgactttttcatcttaataaagttttaaagtaaataattcctgcttctataaataagatcgttcaatctgcaaataccctattgtctgaaataaaaaaaatcagtatcttgcccgacagacaaaaattatattctcaacaaatgattaattatgatacgcaaattagataaagcagaatttcagcaggcgacaactttagcattagaagtatacttgcaatgtggtcaggatgatttcgaagacgaaggtcttgagagtttcaaaagttttatattcaacgataaattgatgaatgaactctgcatttatggagctttcgaagaaaataaactaataggtattatgggaaccaagaatgagggcaaacacatttctttgtttttcatcaaaaaggaattccatagaaaagggataggcaagcaactgtttgactattcccaatgtgattgtccggcaaatgaaataactgtaaactcatctacatacgctatcaggttttacgaatctctgggatttgaaaaaacaaacgacaggcaacaaacaaacggaatcagttatactccgatgaaactcatatcaaacaaataaagaagaagatattaccattagattccagttccccggagcccaaatctaattgttaattatactttcgaatatgtatttcttataaaaatagtttctacatttgcgactgttatggcgaaatacattttctgtatattatttggtatatttctgatatggggatgcaatttagtgcccgataaagaattacaggagttccggacagaggccggtactaccactatacaatcccataataagtcacagagttaccgatccaaagctgtagtcaaacaatccggtaaagaaaacaactccttccaagaagggaaatatgatggaaaatatgattgcaacattgccgatggtattttaggaaactcacttttatcccgtaccacttctctttccaaaattctaagattcaacgtttcttccgttacaattcggatactaagttccttaaaatatcaatttccgaaagaaaaatggactggtctcccctactacacaaatctcaccaaattctcatatagatattacgtctatacactaggacgaatacttatttaaatatctcttttccttctatgggatgagatgagtgtatcttcatgcccattttatctctttatattcaaggcaagaaagcaagaagagtcttttccattgccgggaatatgcatacgatttcacttttacatattaataacttgatatataatggaatttatattagactttattctccacattgatcaatacatgattaatatagtgcaggattaccatacttgggcatatgctatcctattcatcattatattttgcgaaaccgggcttgtagtcactccctttcttcctggtgattctttacttttcgttgcaggagccatttccgcattacccggtatgccgatcgatatccatattcttgttttaatcttatttgcagcagccgtattaggtgactcctgcaactacatgatcggacattttttcggacgcaaactttttcataatcccaactccaggatattcaaacaaagttatcttgataaaacgcatgaattttataaaaaatatggtgggaaaacgattattctcgcccgctttgtgcctatcgtccgcacttttgctccatttatagccggaatgggaaaaatgcattactattattttatgatctacaatttgataggtggagctatatgggtagttttattttgctatgcaggctacttctttggcgatctgccgttcgtacaggaaaatcttaaactcttgattatcgctattatatttatttcaatattgcctgcaataatagaaatattacgagcgaagttaggatcgaagcaataaaaaactttattcatttgtttattaataacaacggccatcaaattaaatatctcaaaaacaatttaatgtactcatatttatgaaaaattctttttttagtaaatttacgcccaaagaaccaaagttctttcctctactgaagcagttatcagatgttttatctgcctcatccgttctacttgttgaaagtatggaacatgatctgcccacagaaagagcagattactacaaacaaattaaagacatggaacgtgaaggtgacagattgactcatttaatctttgacgagttaagtacgacatttatcacccccttcgaccgtgaagatattcacgacttggcttcctgcatggatgatgttatcgacggaatcaacagtagcgccaagcgtattgtaatctataatcctcgccctatttccgaaagtggcaaagaactgagccgtctgattcacgaggaggctatcaatataggtaaagccatggatgaactggagactttccgcaaaaatccaaagccattacgcgactattgcacccaattacacgatatagaaaatcaggcagatgacgtatacgagctttttatcaccaaactctttgaagaagaaaaagactgtatcgaactgattaaaataaaagaaatcatgcatgaactggaaaagacaaccgatgcagcagaacatgtagggaaaatattaaaaaacctgatcgtaaagtattcataaaagcagagcaagacacatggaattattagtgactatcattatactagctctgatattcgattatatcaatggctttcatgacgcagcaaactcgatcgctaccatcgtatcgactaaagtactgactccttttcaagcggtattgtgggcagcattctttaacttcgttgcgttcttcatagccaaatacattatagggggctttggcatagcaaacactgtgtcaaagacagttgttgaacaatacatcacgctgcctattatcctggcgggcattattgccgctattttctggaatctgattacctggtggaagggtatcccgtcttcttcctcccatacgcttataggtggtttcgcaggagctgctatcatggcaaacggctttgaagctattcagctcaatatcattcttaagattgccgcttttatcttcctggctccatttatcggtatgattatcgctttcggatttactctacttgtgctctatatctgccgacgtacaaatccgcataccgctgaaatgtggttcaagagattacagttggtttcttccgccatgttcagtgtaggacatggtctgaatgactcgcagaaggtaatgggtattatcgccgccgcaatgatagctgcccactctatgggtctgggaatgggaataaacagtatttctgatctgccggactgggtagcgttctcctgttttactgctatctcactgggaacgatgtccggaggatggaaaatcgtaaaaacgatgggaaccagaatcactaaagttactccattggaaggtatggttgccgaaaccgcaggtgcttttactctttatatcaccgaaatgctgaaaatacctgttagtacgactcatacaattaccggagcaatcattggtgtcggagcaaccaaacgtttatccgctgttcgctggggggtgactaaaagcctcatgactgcgtgggtacttactatccctgtcagtggactcctagctgcatgtatttattgtgtagtttctctgttcctgaaataaattctgcttcaagggaaacaactcgaaatttaaacaagaaaaatagctactcttaacatccctctacagtattttgtagagggaatactataaaatgatacacatagaaccttaaatatttaacgtctccttcgagatataaagaatttcttcagaaaagaattattaaacataaatcttttattattattttttaatactatctttgctttcattgtgtaatgcgacaggcaaatttaagtaataattctatgttcactcaagacgaaagttatatcaaatggaagttatttttagaaggagatgaccaggcatacagctggatatatactcattacatccaagtgctctataattatggcttacaaatcactcctgattctgaaatagtgaaagactgcattcaggacgtattcgtaaagatatataaagccaaaaagaaacttactgtacctcaaaatcctaaagtatatttaatgattgctttaaaaaataacatctataatactttcaatcaagaacgattgcaaaaaaactatgctttcagtttataccaaacagaagagcagcttactgttaaaaacgaattcattgatcaggaagcccggcatgaagaaatgaataatattaaaagaatgatgaaaatcctgactcccagacaacgggaagttatttattaccgctttatagaagaactgagttacgatgatatttgccagataatggggctcaattaccaatcggcttataaccttttgcaacgctctctacaaaaaataagagaagcctatggagtcactggaatatggatgttaatactccatcaactgacctatttacactaaaaaataaaaatctcaaaaaaaataaagagcagttgagtagatttgtcaattgagattgtcctaagataaatcaacattgaaaatggacattaaaaacaaatatactcactactctgcagatcaactactcaatgatttctactttttggagtctgagcagcatcccagcccagaaagtatcgctttttgggaaacgatgcagcaaaaagataaagcattagcaaaagaaataaaaatagcacgttcttttctgcatgatattcgacacattcctgtttcacacttaccgcaaaacgaagtagaaacagtgtggaagaatatttccagactcaacaatatagaaaaacaacgaaaaaagaaaattctttttattaatcatagtatattagttgccgccagtttagctcttatactctgttcggcatggtattttcaatcacaactcagcattatgcaagaaaaaacggaactggaaataacagctgtaaaaaggccgaacgctactcctactgataatatccaactcgtactttcgaaaaaaaaacagatagatattgatggaaaagaaagtcaattacaatatgatcatcagggcaagattaatgtaaactcccaaaccattattcaagaaactgatgacaaggaaaagactaatatttataatcaattaatcgtacctgccggtaaacgttcatctatcactttcaccgatggtacatgtatttggttaagcgctaactcaagaatcgtttatcctgtggaatttaaacaacacaaacgagaaatatatatagagggggaagctttcctcagtgtatctcatgacccgaaccggccattcatcgtgaaaacaagccaaatggacattcaagtattaggcaccacattcaacgtcagtgcttatgaaaataaacaaacgcaaagtgttgtattagtaagtggtaaaataaaagtaaaaaccagcaaaaatgaaagtaagacactttctcccaataacttattaagttataatgaacaggaaggcatccatatccaatcggtagacgtacaaaaatatatcgcctggaaagatggtttttacctcttccaaacagaaaaactaaaagacattgctacaaaactcagcgattactatggcaaaaagatcatgatagacagtccattgaagaccattacctgcagtggtaaactagatttgaaagaagatcttgacgaagttcttcagacactaatacggactgtcccggcaagaatagaaaaatcagatggaattatccatatttatgtaaaacattaattaaaatcgaaagcctatgaataaacattatccttaaaaaaataaggccgaataatacccttaatatcatccggcctttgattaaattacttacacgttaatattaattaatctaatcattacaaatgtatgaaaaagcaccgattatttagtcaccaaaggactaaagataaacaactattactaatcatgaagtttttttcactcttccttcttatcggaataggaaactgtttggctacaaacacgtattcgcagaataaactattcaccattaaatcatcacaaaagactataacggaagtctttcatgaaattgagaaaaatagtgaatatattattttctacatggaccaactcattgatacgaaccgcaaagtgaatatcaatgtcagaaagcaacaagtaagtgctatcctagatcaactttttgccggaaccgataacacttacagtatcaacgatcggcaaattaccatttaccgcaaaggagagcagccaactcctcaacaagaaaaaaataaatttgtaatcaccggtgttgtcactgattcacaaggagagtcagtaatcggagcatctgtgagaatcaaagatacaaccaatggagtaatcaccgatatggacggacgctatacaattactgcacccggaaaaaacagtattttggtaatttcatatattggctattcaactgaagaagttaaaatcaatgatcgtcgaaacatcaatataagattgcgcgaagacacaaaagcactggatgaagttgtagtagtgggatatggacagcaaaaaaaggaaagtgtagttgtatccatgagttccgtcaaagtttcagacataacagctccaacaagaaatctgactaataatctggccggacaagtttccggtcttatagcaatacaacgatccagtgaaccgggatttgatgatgccgaattttggattcgtggtatcagtacatttgcaagcaactcggcagcttctactcccctagttttagtggacggtattccccgtaaaattacagatatcgaaccggatgaaattgaaactttttccatcctaaaggatgctgctgcaacagctatctatggtgcagaaggtgcaaatggagttatattagtcactaccaaacgcggtaaagatgaaaagccgaaaattacttttaagaccgagcattctatttcaagtccccaacgtttgccagaatttgtgggatctgccgattatctaggattatataatgaagcattgcgtaacgacggtgaacctgctttattcagtgacgaaaccatagaaaagtttcgtaacagcactgatcctgacctctatcctaatacagactggattaaagagttgctcaagaaaactacaaataatcatcgatacacactaaatgtccgtggcggttccgcacgtgcaaagtactttgtttcaggtgcatattataatgaaagtggaatttacaaaggcaaccctacagacaagtatgatacaaatatcggacttgaccgttttaatcttcgttcaaacattgatatggatgtcacctcaacaactaaaatttctgttgatttggcaggacaatacttgatagctaactatccaggctcatcttcatccagtatcttccgttccatgttaattacccctccatactgttttcctgctgtatacagtgatggcacagtagccacttatgaacaggaacgaggagttaatatgaggaatccatacaatctgttaatgaactccggatatacccgccaatggcggacaggaatccagtcgaaagtaggcgtacaacaaaatctgaaattcataaccaaaggattaagtgctaaaatgaatatcagttatgacttcgacgcaactttcaaatccatacgttcatacaatccatcacgttatcatgcaacaggcagagacgaaaacgggaatcttcaattcgcacaagtagtttccggtactccagaccttagcgacctgaaggacaacggtatcgaagcgaacaaaaaaatatatattgatgcttccatcaactataaacggacctttgctgaaaaacatgatgtaaccggaatgttgctctatatgcaaaaagaaacacaatataaaaccgagccactaccataccgtaaacaaggtgtagtaggacgtgtaagttatgcttatgacggacgttactttattgaaggtaacttcggatataccggttcggaagccttcgccaagaatcaccggttcggtttcttcccagctgtaggagttgcttactatctatccaatgagccattctatcccaaagcaataaagaaaatagccaataagattaaaatcagagcttctgtcggaaaaaccggtaatgatactaccgataaacgttttgtttatagagctacttataatatggcagccggttcatggtcacaaggtataggaagtaacggaggtaccaatgcaataggcaatgctatcatcgaaggattccccgaaacgctggatatcggttgggaaattgaaactaaacaaaattacggcttcgacctaggactgtttgacaacaaagttgattttgtattcgattatttccgctctgaaagaagtcatattctgatgcaaagaaatactactcctactgtaggcggattccgcgtcaatcaatatgccaactacggtattgttaataatcatggcgtagatatgtcactgaatattcatcagcaaataggaaaagtaaaactcagtgcacgtggaacctttacctatgcaagaaataagatcgttgaatatgatgaattaccacaaagatatccttggatggctcagacaggtatgagaataaacgaaaattatttatatatagcagaacgtttatatacaaaagaagactttattgtcagcaaaaacggtagtggcatcgaaacttatactctacgttctgaattaccccaaagcacattggggggactgttaggtcctggtgatatcaaatataaagatataaatggagacggcattatcgatagctatgataaagtaagaggtgtaggacatcccaaagttccagaaattgtatatggatttgggctaaatatagaatataaaggattttatgccagcgcattctttcaaggtgccggcaactgttccgttttgctgggaggtaatacccctgaaggatggtttcctttctcatggggagtagaccaatcgaattaccgtacattcgctttagacaggtggactgaaaaaaatccaagccaaaacgtattaatgccacgcttacataaagacaacaccaatgccgctaataatagtgtagcaagcacttggtggttacgcaacggaggattcttacgtctcaagaacgtggaattaggttaccaattacccaaaaaactcttaagtaaaataaatcttcaggcagccagaatctatctgatgggatataacattgctttatgggacgatctgaaatattttgatccggaagctggtaatgccaatggtggtaatacataccccaaagcacggacatttactttaggaattgactttacattctaattaaatttattaagtatgaaaacaaaaaagaaactatataggaaagtactgatagtagcttttacgctatgcaatctctgttcatgcaactatctggatgtatcagatgaactagccggaaatcttcaatcgttggatgagatatttgacaatgtcgcctataccaaaagatggtatgccaatatttttactgctatccctgattattcgggtatcgtcgctgcagaaggcaacgtcacaggcttcaaaaacccttgggctggtatgtgtgacgaactaaccgttggctatggagacaacaaattatacaataaaacagaaaaaaatgcagcaaacatgggttttcaccgttggggaaattgttataaacaaattcggcaagctaatatttttctggccaatgccaaaccaatagctgccaatggcacccacgtcgatgttctgacagaagaggaacttatagaaatgaaagctaatgtccgttttatgagagcttattatcattatcttttgtttgagcaatatggacctattcctcttgtaaaagacgccatttacgaaagagatgatgacttagatattccacgtagtccgattgatgagattatagcttacattgatcaggaactgaaagaagtatccaatgaactgtcacaagaagctctacatgaggatgaccaacacaatgcgtggcccacaaaaggtgtagcactggcagtcagagctaaactatgggtatatgccgccagtaaattattcaatggcgagtacaaagaagcattatcgattactaatcctgacggacaacggcttttcccagataaagatcccggaaaatgggagaaagcagtaagtgctttgaaagatttcatgacattcgctgaagatgaaaacaattatgaattgttggaaaatgaagagaacccttcacaagcattgtatgatttatttcaaacttacaatcgagaaattatatgggccactgctgccaatacctggggtggtatggatggagatgcctttgaccgcagatgtaccccaagaagtgaacaaaatggaatgggatgtacgggtgtcactcaagaattggtagatgcattctatatgaatgatggttatccggtacaagaaacaagtttcctaaaacagtctacactctacacaaccgagggaacagacacttataaggaaaaagtcgttaccagcaacaataagaaagtaagtgatgccaagaatgtcagcaatcgattcatgaatcgtgaaccacgtttctataataccgtattctttcaaaacagaagatggcacgtcagtaataacgttacccagttccataaaggaagtcctaatgaacttagtggtactatttatactcttacgggctatatgctgtataagagatttaatcgtgaggttaataagaaatcaccgggagttacatcaaaattccgtccttctatcattttccgtctagccgatttttacctgctatacgcagaagctgtcaacgaaatcgatcctaacgatgcacgagtattgacctacctgaataaagtacgtcaccgcgcaggattagaaaatatagaaattttgaatcctgacattgcaggcaaacaggatctgcaaagactggctatacagcgtgaacgccgcatcgaactggctactgaaggacaacgttatttcgacgtacgccgctggatgatagctgaccaagaaggtgaaggacgtcaatatggatacgtgcatggtatgaacatgaatggaactgaagataaattccttcaggaagtagaggccagccccatcgtattcagacgcaaaatgtacctatatcctattccggatagtgaaatgaaaaagtctgatggacaacttgttcagaatccgggatggtaatcttaattatatttcatgattaaaaatataataacaatatgaaaacgatacataccttattagcagcaatgactattgcgatgctggcaataagttgcgagaatgaatttgatgtctccgataaagcagacagtctgatatctgttacagtcaacaccttgaataatcaagcagcctataatgtcggagaaactgcccaagcggaactatggatacaacggggaggactgaaagatgcctccggtaaagttcaattcgttgtagaccctcttttgcttgactcgctgaatcaagaagataaaactaattatgagttattgccggaaaattgttatgaaatgacaaatacagaatttacggtagataaaaacgagttatgcggttacatcacgtaccatcctgaaaagatactggctttgtcagcgtataacgaaacaaaatatgtattgccattacgactcatttctaacgatctggctattaatccagcaagaaatacatcttttcttgcatttaccattttggaacctatcgttcatatcagtaatgctggagtatataatatcaatccggatctaacttctacaatggatatacagatcggagtaccctttaccaataagtgggatattctttgtaatctgacagaagatttatcattgattgacgaatataatcagattaataaagtaaatttcactttacttcccgaaaatgcctatactgctcctgaatccgtaactcttcaggaaggagtcagtcagataaccgcctcctaccaactaaaaaacaatctggtaccgggaaactatattttacctataaaaataggaagtatcacggcaagccaaggaggagttccgaataactcactggtaatagatgaggaaagcaacgttttgttctgtattgtaaaagaagggaataagatcaacaaatccggatgggaagtgatagagtgcagttctgaacatgcagggaatgaagctacatacatgattgacgataatgaaagtacatactggcattgcaaattcaaaaatgaagcaggatcatctgtacctcccttccattttattattgatatgaaaaaagaaattacaatcgctcaaattgacttacttaatcgtggagacggagctgccaataatattaaatgggtagaattttatgccagcaataacaatagtgaatgggataaaattggtgccggtgattttaatgatgaaggtaccagagcaacattccgatattatgtaaagtctaccaaagcacgatatctgaaacttataattcctgaaggatatggaaataactgtcctcctgccgccattcgcgaattgactgtttacggattagaaggtaataattaaaaatcagtattatactcaaaaccttatttgatttaaacacatgatgaataaaagatccctcaatctgctgccttgtgtcgcagttctatgttcttgttctttgcccgcgtatgccgggcaaagttcaaaaaaagaaaaaaaaacaaaacctaatgttattatcattctcgcagacgatttaggttatggtgatcttgaatgttatggtaccacacgtgtacatacccccaatgtaaatcggttggcttctgaaggtatacggtttaccaatgtacatgctaccgcttctaccagtactccttcccgctatgctttgctgaccggagaatatgcatggagaaagaaaggtaccggagtagctgcaggtaatgcaggcatgataattcgaccagaacaatatactatagccgatatgtttaaatcggcagactataccaccggagctattggtaaatggcatctaggattaggtgacaaaacgggtacacaagactggaacgggacaatatctcctgcactcaaagatataggattcgactattcttatatcatggctgctactgcagaccgtgttccttgcatttatattgaaaacggtaaagtagccgactatgattccaccgctcctattgaagtcagttatcagaaaccatttgaaggtgagccgacaggaagaaagaatcctgaattgctttataatctcaagccaagccacggacacgacatggcaatcgtaaacggtatctcgcgcatcggatacatgaaaggaggaggtaaagctttgtggaaagatgaaaatatagcagacaccatcaccagtcatgccatccgtttcattgaagaaaacaaagagcggcctttctttctttattttgcgaccaatgatgtacatgttccccgcttcccacacgaacgtttcagaggtaaaaacccgatgggattacgaggtgatgccattgtacagtttgactggagcgtgggagaaatcatgaaaacgttagaccggctgggattgactgaaaacacactcattattctatccagcgataacggtccggtactggatgatggttatgatgacaaagccgttgagcttgctggcagtcataagccgggtggtcctttccgtggtggaaaatacagtgccttcgaagcgggaacatgtgttccggccatcgtacgctatccggcacaggtgaaaaagaaccaaactttaaacacattgctaagccaaatagactggatccaatcattggcttctctagtaaatgtcactattccccaaagtaaagctccggacagtcaaaatcatttagacagttggttaggaaaaagtaaaaaagatcgtccttgggttatcgaggaatctaatattctggcattatccgtacgcaaaggaaaatggaaatatatcgaaccttccaatggttcccccatgatcacttggggtccgaaaatagaaacaggatatgcaccttatgatcagctgttcgatatgaataagtccgagtttgaaagcgaaaatctggctccgaaatatccagccatagtaaaagaaatgaaagatatattggtgcaggaaagagcaaaagggaaaaagtgacatttattgaaacaacaaaatatatggcttcaccaaaataaacaaaaacctttctatttattttcaataggctaattataaaattcaaaaaggtgtgtcagaaaaagttctgacacacctttttatatatactaattcagctaatcttacttcacttcctcaaagtcaacgtgatatatctatcagcgacttgcatacacgtgttgcaaatataacgcaaatctgaaaataagcattcataagcaacaacagctcttgactgcaaaagtacgatttttattcataaacaacgggatgtaaacgcataaaaatcaaaaggaagctgtatttttaatagattcttcagttttatccctacctttgtagatagtgtgggattgtacccaagaaccaataagaaagcgattaagatatcattcactgtaatgtttcatcattgactgttccacatcttccttaggatgttgaatatgccccatagactccatcagatagtctgcaagccgtgagaaatcatacttatgaaatttatctgcaactcttttctttatctgtttacatgctacatcaagtatatactcaacaaaaaacggagacatctctccagcctcatacgaacaaacctgagacatacacttatggctgacatctactttacaaactgtttttaatacagtttcccgattacaaattgccagaattgcaatttttccagaccaactacaattggactgtgaagcatcaatattaaaattttgatcaataatgctgacaatagaatcttcaattcttaaatcctttgctaattctatattcaatgtttgattttctatcttagcttgagcattaacgatatttatcagagatggattaaacggaggaaagtcaactgtattcggattcttttcttgagtgtgattaaaataactttgatcaacaatctcacactcatttttatcaacccattcctttacataagcaatcttatcaactctatctgccatatcaatcttatctatattcagtcttgttcctgtaaattgaatgctttggataatatagctcaaataaggtattaaataatcactctcatagatttgttcatcctttccaaatggcacgatataaaagaaagtcaaatcaatcaaagtcaatgcaacaatacactttggatactgtgaatttacagtctgtttatgtcgtacaaagacctttactaaaggctgacttatgcatgaatcacgatagacataaaatacatttggaagtactttgggaacaaagtaacccttaatccagtcaattgttgtaccgaactcgttcacaagatcacgcggcattaaatctatagcaatcttggctagcgtcttataaattcctaaatgtgttattggatcagcaccttcaagtttgacaaaatattgactttctgtctcgtaaagaatcgccaaacgtgatattttaagttccccagtagggccatcatagtaaaaattatgcccatacacttgaataattttatttttcttgttagcaattttattctccgaccgacgaaatttaagatattccgtcaattccttgtcaatataactcaaaacagaattacaactctggcattcatcattacagaaaataaatttattcccaagagcatcaggaattgcatgagcatttttcttcttaaaacgtacctcaggatatttcttaccacagaaacgacagatgcaagtctttaaatcatctggtcctgtatattcttccttgtctccatacgatattatatcatatgatgcggaaaaattagcgtttccaaccataaatatagctttctttatcaaattattatctaccttcaacaaagctccctctctaagaaatgctaagtgcgtattatctatttggcaattaaaataattctcaactttatataaatcaaattcttgtgatttataactactacagatctcatgtattctgttttttagttttcgggtacaatggaaaagtttattgtgagaactatcatctatccattcaaccggagttacaccacagaacagattaagcatatccatccatgcaggatgcgactgtggaagattaatccctagttcaacacctgattcattaaagattcgacaaacaaagctcgacatatcaaaagtaaattaacatataatccccaatatacatccataagccgctaggctcttaataacaaaagtagttatttccttcataagcaacgtgacataaacgcataaaaaacaaacaaagggatgattttaacattggttctacggtttaatccttacctttgtgtatgattgtgtggaattatacctaagaaccaataagaaagcgatgcagatacataacaatacattgataactgaatgctcagcttacgatttcaaggaaatgctggaacgtaagaaagtaaagtcatggcttaaatccgtatcagcttttgccaatacggacggtggcagtttgttctatggagtgaacgatgacggaatgattgttggtttggaaaatccgcaagccgatgcagactttatcagcgaaatgataaaggcaagacttgatcctgttccggaagtgcaacttattccgatagaacatgaaggacatactctacttgaagtgaaagtaaaggcaggaatgctaacaccttattattattaccaagacggaacacgcactgcctatacaagagtgggtaatgaaagtgtggaatgtaactcccaacaattactttcgttggtattaaaaggcacgcatatgacttgggattcacttcctacccaagtggatgccaacaaacattccttcattatcctcgccaatacatttcatgaacaaactcaccaggaatggaatgacaaatacttggaatcattcggactggtcacatcagacggcaaactaaccaatgccggattgctgtttgtggataactgtaccgtattccaatcacgtattttctgtacccgttggactggactctataaagatgatgccatcagttccgtagaacatcgggcgaaccttgtattgctcttaaaatatgggatggacttcatcaagaactacaccatgagtggctgggtaaagatgccaaactatcgtctcaatctccccgactattccgaccgtgctatatttgaaggattggtaaaccatcttatccatagagattacacagtaatgggtggtgaagtacatattgacatctatgatgaccgtgtagaactagtatcacccggtgcgatgcttgacggtacacagattcaagaccgtgacatatacaaagtgccgtccatgcgtcgtaatcctgttattgcggatatgtttacacaattggactatatggagaaacgtggctcgggcttacggaaaatacgggaacttacggagaaactgcccaatttcctgcaaggtaaagaaccacaatatcaaacggaagcgacttctttcttcacgaccttttataatctgaactggggggagaacggaagaatacctgttggggaagtggccaacagggtaaatagtaccctcgaaaagtaccctgtaaacgaagaaagttcggagaaaaagttcggtgtaaacacggaatggttcggtgtaaacgaagaaagttcggagaaaaagttcggtgtaaacagcaacgagcaacctaaaaaggttagtagaacagcccaaaagatcattgatctaatcatttctgattcatcaatcactgcagagaacatggcaaataaaattggtgtatcaaaacgtgcgattgaaaagagcatcaaaagtcttcgagatatgggtattattatccatgagggttctgataaggctggctattggcgcattattgttaaaccataaaccgaacaataaacctatgggaacatctttcataccactcagtgcaataattgccgttttgattatcgcttttttgtttgcctccttaccgcaggtaaaccataaaacgcgatacagagcgctttatgcaatagccatcatcatgctattagccgttattcctatcagtgagtacatggctagggacaccaaaaattcaagcaacaattatctgcttgtcctaatattcgatattgcagtagggtatttttgtatgtacattgctgctttgctgaaattcaatgttcttaaacgaaagaatcaagcattagaaaatgccttgacagaaaaaaagcaagagaaagtatctgttttattggaacatcaaaacgaaaagcaacaagctcttcagcaaagagaacttgaatggttagcagataaaatcaatatgttcactgaagaagaacagaaagcgattcttgccagtgctctatcgtttgccgaacatgacttgatagttgctcccttaatcaacatacagcccaaagacacttgcagtcagcaagaacttatgtactacgtttgttccgtctttttcaatctgagcaagaagcgcaatgaaattgtaagtttcttaattcaagtctttccactctacttccctgctggagaaagcgcattagctaaaaagatgccgggattggaaaaggtaaaagagagaagggagaaagaaggataagtaaaataatgattatgaaaaaagaagcaatcatatcagcaatacttgacgtttgcaaagacatgggtttggactatataaccaaagtaaagtctgccacatagaatgctgatgttgttgttgaacataatacatacaagttggctttatccaactcgatgactaagaacacgtgttggctgaatcagaattaggaattgaaagcgaaaagatcgtctttcttctcttcaataaagaaagtgagatagcattcaaagatactgattacagaatatttaatgttaataattatctaaactcaaaaatgtaaagttatgataataaaagacttcgattgggatgcttatgaaaacaaccaagtcaatgacgaaataaacatagaagaacaaagattagataatgaaaaattgttgaatgctataaacaacaacgaaataatcgaaggtataattatttcgataaataagcgcgaagttattgtcaacgtaggttatatacgcgatggaataatttctgcatctgagtttcgttataatcccaatcttaaaataggtgatgttgttgaggtaataatcgaaaaagaaacttctataaataaatatcttatcatttcccataaaaaagctcgcttgaaaaaaacttgggaaaaagttaaaactgcattagaaaacaatgagacaatctcttgttatgtgaaatgccgcaccaaaggtggcatgattgttgatgtttatggcatagaagcatttttacctagttctcaaatggacattgtaagagttcctgacctcgaggtatatgtaggcaaaaaccttgatgtcaaagttgttaagattaataaagaatacatgaatgttgtggtcagccataaaatggtagtgactgaaaacttacagaaaaaaagttcagacaagactcttctaaaagatatttggcagaaacatacggaagtccaggaacagatattgcgtcagaggacagttccccttgcgattgacccttcaaaatcagaaattgtcaatgagaagcttcatgttgttcttgacacttctgacaatactgagcaaattaaaaaagcaataattcagactttggacataacagaggattactgtcatttcgatgatggttatatcattgcgccaatctctaattggtgtaagttggatgagtctgtaaaatcaaggttaagtacaaaagctaataaagaatatgtttcttttactttctatcctgtaatcgatggtaagataactgatcaaaaagctcagtttactggagtaaaaggattattagacaaacttgaaattgactacgactttgacaaaaacagacgtttacagattgccatcaatgaacttcacaggcttaaaagcaatgaagacttcaagcagttgcaggtctctttacctgatactgcatctgcaatcatacccacttatccaagcattctatattatctggacagaatctatcctaaccataatttcaagaatattgagacattcaaagaacatacaagtgctataggtggagtctctgttcgtaaggaacttgtcatagaaggaggttacttcaataacaaggtattagaacaattaaatgaactttttgacctgagaatgtatcgagtggaatttgatttcaaaatcaatgaagatgtactcaatacatatgattggtcaaagaatatattgggcttacctaaaggaaaagatggtattgttactttttggagaaagattaagaaagccccaaaaaccaacatcgaatttgaagaagaaatagaggatgaggaaacatccgaaatgttttctgatacagaatactttaacagtaatatcactgatgattttcatttcgaatatatgcttgaccgcaaaattatcgacaaggtatttggcaagagaaactatgtagtaaccgaacgctatttttatgaatacaaagaaaatagaacatgggctactaccgaagaactcgatcgatttaatgatcaaatccacattgagcttagaaacaagagctttggcatagaaagaaacggttcatcaattggcattgacttcaattggaaagaaactagtcttccagagctcttgactcagctgagtcgagagtttggctttattgattttggtctgtataaacgaggtcacaaatgtaactttgatataaaatacaagaaagctgagctgactggaatcatggaagaactccgtaatgcttttgaggatctaaacatagaactcgtcaagaaaggtacggagctatctttctttaaagaatttacgaaaatagaagatcttcttgcttttaagcctcatcttgcccataagttgaactcttttgattcttctcgttattcgtgtacgatttctgatgttccatcggactgcgtaaagttattatacttctatgacaaacaaagccgtaatgaggaacgaatcgaagctgttcaagaacttaaaagcgcagatttcttagcaggagatcttccaatcggtaagttgattcgaatttcagcatatccagagattgttttggatatttctggtgacaactatgaatttacaaaacagctgtttgaagaatccaatgtagagtatatcacacctgatttgtctggagatctggaaaaacttgcacgactaaaagaatcattaaataggattatcgaaggaagggaaatagagaatgtttctttaggagattttatatttgatgcatctaaggctgcgggtataaaagatttcgatgagaatataaaacttgaactacaggaaataagcaaacatattctcaataaaaaaattgaaaataatgaacctcagaaagttgcaatagctaaagcactccttgctccagatttggctttgatacaaggacctccaggaacaggtaaatctacagctattgcagaaatgatttggcaacacacaagagagttccctgataaaaaaatacttcttacgtcagagactaaccttgctgtagataatgctattgacagagttgtcaatgaccagcataatctaattaagcctattcgcataggcgacgaatctcgcttggaatccgaaggcttacaattttcttacacagccatgtacagatgggcaaaaggcgaagattggagaaagaaaaaaggcactgttgacctcgatgacgatgatgaagaagacaatgccgtaacaactatcgaagattcagtatatgaagtacccgaaaagcttatattactgaattggatggaaaatataagcagacgcatggatatggaaaagatgccatcagaagctcaagagttatggaaagaattacttgatgagccaactcctgagctaaagaaccttttctttgaaaactatgtgtctaattgcaacgtcattggtgctacatgcagctcaatcggtcagaagaatattattctgtcagaagctatggaatcaggaaagcggaaccgatttaagccgaccaaattctatagcatctataggcagattttcagtaaaagagatggggagtacaaccctaagattcgatttgacatggtcatacaggatgagtccagcaaagctactcctgccgaattgtcattgccattgatctatggtgtcaaaaacgtcattattggagatcataggcagcttcctcctatgttgtctcgtgagtccttcatcaattcttttgattatagtatcaagcgagaaaagaatgatgaagaaaagcagaaaatgaaagagttgcgaagttacgtgcttaagaacttcaaaactcttgaggtaagtcattttgagagactatacaatcagattgactctaatcttaagggtgtcttcaattatcagttccgtatgcatccagccataaatgatgtcatcaagcaattctacaaagacgaaggcggtctggaatgcggtttagtgacaccaaaagatttaggtgtgaacgatcttgacttcattaataatggagcttcaaggtatcatgggattacggcaggacctattactcctgacacccatgtactctggattgattcttcaagtccagagatgctggacggcacatcacgagtaaactatggcgaagtacagatcattaagaaactattgactcaacttaatgaatctgagtcatttcatcaatacacagacagttgggcaagtgtggaagacaagcagattggcttgatttcattctatggtaaacaacttcgtctgttaaaggaaatgactagagaatttgataattctcagatacctattagagtaagcactgtagatagattccagggcatggaacgaaatatcatcattgtttcaatggttcgaagccattgtatacaaacagaaaagggtcagaagcccaatttcgagaactacccaggaatgggttatccaattcaggaagaccttggatttgcccagtcaccgaaccgtctaaatgttgccttgtcgcgagcaaagcgattgctaataatcgtaggcgacagcaagctcttcagaacaaaggatatctatgacaatgtctatacgacaattagtgatccaaataacaaatatggtaaaattataacagctcaggagtatggattataagacgataattgaagaaggtaagcttatatattcttcacgcacgacagacaccatgttccgtgagtggagattggcaaggactatgtgcaatgtaaattactacaccacatatcctttgaccaaactggacagaatcatactgctgactctggaaaaaaatggaagaatctacgagaatcaacttgctaaaacactaggattcaatgtagaaaatgacttcgatgctaatccaaaacgttatgcagacaagggtgaggaaggtatttttcaaggaatactttccgaggtcgcttcgtatggacttatcaacagaaaagaccatctgatttgtttgtctaacatcggatgtcttgccctaaaaatggggatgaaatacaccttccatagtggctctgttgccttgatggaaagctttgaccttgaaccaaaagaaagcataaaatacaagatgttcccattccgcgatgctttgggaatagtcacaggaatcccaaacagtcagattctgagctatgatgacttcgattttccggaactgaaagaatacatttatggcgaaccttctgagttggtgtctcgattgtctttacaatgcaatagtgaagtcaacattttcaaagccgaaaagagtacagaatctcgcatgggtgagatttatgttgattttaggttatatgagattaacggaaagaaatatccgttggtatttcataatggtactatatcaagacatactaacgaccttcttttacaagattgcaataagttatacataaacaaaaaaatccacattggagaatatctgtatctggtacgcgaaagcgaagaagtactagattatcaatctatgattccatataaagatgtttggaatcttgatgattttcttagcaacagccgtcttgattggagcgacgaaagactttttacggaaattgcaaaagaagcaaatggctctcaatggaatatgatttctgacgtatgccctacagacgacttagttcctcacttgacagaatataaggactctttggattggatcgtactgtcagcacgttttgacgatgactttatagttgactctgcaatttcttatccatgggacttcgagacattgtctgctgagagaagcgcagacttcattaaaagagtaattgtcattccccaattgcataaagatatagattgggattgggaaactattttatcgaaactcgatgatgagtttgtcatcaacaatattgcgaatgttccatttgatatgtactctgtatctgagagataccttagcacatatcctgatgtcattgttaatcatcctgataaaagatgggactggcagtatatttcgactgaatcagatttatcatacatacttaaaaacgtatctgcattatcaaattatttgcagtttgagacggtgatgtcaagagcgtttatgtcttctgaatatgctgatgcctactgtgattcaagcgaatttacatttgctgttattcagaagaaagagtggctacaaaatcgctatcttgccaacacagcagaatatttatggactataaagctgatagattggcatgagaagttaggctttgtaatgtggaaatccgaaaacaacatggaaggtcttgaatgtaataaaggcatttcatggacttctgaggtattcgagcactataaagacagctctttctctgtcaagggtctgaaacacatatctaaatctattaccgataatgtcttaattgacctgaatcccgaattcaaatggatttggtctgtgttatcgggcagggacatcataactaatgatgttgattttatcgagagacacgtatctgaattgtctctaggcattgctataccattaattgcagccgatcatctaactactctatacaatagagcagatttcaaacaacaggtaaccgagcagaaagtatgggataaacttactgattgcatagaaaaggtcacaatacttaaaaatataaccgatcctaactgggattggcatatgattacaaagaatttctgttcaactctaaacttcgcagcccttgataagctcaatgtcttagacaaacttgattggtactacatttctaacaatgcagatactaacaagataatagattgtcttgatgattatgaagatcgatgggattggtctgttttgactaagcgcttagatcatgatttcatcactgacaaccttcctgagtatttccagcattgggattgggactacataatcacagatgtcttaactgaaaatgacttgggtaagtcagatcttagaattgaacttgctatcatcttttctcagcttgacaaagagattagaaagaacctatggtgcaaattaactgttagatttagcaccgaggatattttcaatatcgttaagactaattctcaactgacaaacgtttcggttgtttatgagtggaattattctgatgtatataacagacaggatttcgacatcaataagattctaactgaatataaggatacggaatttcctattgactgggatgctctatcggcatcaaaggctcttaataaaatcttattatgggataaaaaagccattaaagacttttctgtttgggaagatgtagttcttagcatcctttcggataaagcatacaactggaattttaaatatctttctacattagcatcaattaactggtgcgacagtattcttcaatccagagaaagtgaatgggactgggcatatttatctgaacatagcaaatgcttcagttttaacctgaaacgtccatttgaaattgtaaaacgcattcgtagattcgataaatatttagactttggcattttgtcgaagcgaatagacatgaagcttacaatggaaatgatgtcagacctccttaaatatagttgggattggactgcaatttcttcaaacaaaggattcttacttacggctgattttgttcaagaaaataaaacactttcatgggattggaaagaactttcttccagaaaagattgcaaattctctccagaattcattcttgacaataagtctctatcatgggattggcagcacctatctaagcgtaaagagattccatttacagcagagataataataaaactcgtagataaggaatgggattggaaagaactcattggaagaactgatcttgtattcgaagaagatatgctaccgaaattagtagacaaggatattgactggaaatcttttagtcaaaaagatagcttctttcctactttgagaacgttgaacctactgaaggaaaaggatcttgattgggatagtatttctaaacgtaaggaactactatacgaagtgatagttttatacaagcacaaactcaattgggcaattctgacaaaaagcagtcatatcgatttgagcaaaaccaaagttcttgaaacattcaaagataaccttgattggacaattgtctcttcggatccccaacttactccatctatggaaaaccttaaacagttcaaagatagggtaaattggtctgttatttgtaaaagaagagatattgtcatagatgagactttccttgatgcttttgagaataagattgactggaaaagaatttcccaaaatggaactattgtattcactcaagaattgatagaccgctacaaatatagatgggattggattgctttggcagagaacccagctttcagatcatctggaattgaaaaagcatacacgagtgaacttaaccttgttgagttctataataaccttaaagaacgtgagtataagccatttgtataccattttacccatatgtttaatgcaatagaagtcatcaagacaagaaaaatattaagcaggaacagagcaaatgaacttggtttgctgaaatatgatgcagcaggatctgttgtgcatagatctgcaaaagcgcatccatttgcacgtttctattatagaactggaacacaaacgcagttctataacgaatgcttaggaaagcagcgtggcacaaagtatttcagcaaggcagaaaataacggtcttccgatgtgtcctatgccagttttcttcaaatttgatctccaagaagttctggcaaaacattccaatctatgctattacagtactggtaatatgcaaacaggttgggcaagagtatataaagttgtagatgaccctaataacattgattctgtaaatctgtacagcagcggatggagtaaagtcgttcaagaaaaaaaacaacaagaatttcttgttaagaatgaatttgacttttcggaattaaacgactatcaaataatttgctacgaccccgaagaaactgaaatactaaagtcaatattcaaacatgaccctatttgtgaacacatctattgcgccgacgacgtagaaagtatatttgaaaaagagaaccctccattggaattcgatatttcaaagcaaagaataaatataaagacttcatatattggtgagtatatattccagattgagagtgctcaaatcaacaagatacgagtgaataataatccgtcttcattcattaaggctataaaagggcatgtaatacaggtacgtgaatatatatcagtagaatgtggtaatgtaccttttgatatttactatgttaatatgaatccaaatgcacgctctccaagatggcttgtttatcaatacaaaccggaagtgcatgaagagaaaattacagattccaatatcttagaggagttcctaggaataagttttgaagatgatgcctattcgccagaagagctgattacatcattagaattagtaatgcctaaacttgaaggattttacaacacacgtgtgagacattatgtcgtaaaaacacacacaatgttggtttgtaaacaatttgagaaatatgcatttaattttgatacaaattatatgagtattgacctaatgcgtattgtgctcgctgtacacgatatagggaaagctattgaccgtgcaaatcaacatgagcacacattatctataataaatgaactttggaacctgactcctttcactgattatgaattgaagctaacagaagttcttttgaaaaatgacaatatgggcacatattttcagagaaaattcagtacagaagacttaaaaaatgaaattttagaggatgcaaaggctctgaatattccgcaaaaaattcttcttcaatataagatgatcttgtatcaatgcgatatatcttcatatacaaaagatgctggtggtctaaaatatcttgaacacatgtttgaatatgaagatggcgagaaagtctttgatgataaagaaggcatcattgtcatgtcatcagaatatattgaacgatataatctactaaaatcagaagtcgatggctaatataacttttcataaaggtaatatcttcaacaccaagatgcagactattgtaaatacagttaactgtgtaggtgtcatggggaaaggtattgcgcttgtattcaagttgcgatacccagatatgttcgaaaaatacaaagagctatgtcagtcaaagttaattggtataggaaagctttggctctataaatcagaatcatgccctcaatgggtgcttaactttccgacaaaatttcactggaaatacccaagcaagattgaatatcttgaagcaggtcttcaaaaattcgtggacacatataaagaaaaagggataacttcaatagcctttcctctcttgggaacccataatggaggtttgaacaaggttgaagtacttgatcttatgtataagtatttggagaaatgcaatataaccattgaaatatatgaatatgatccactttctccagatgacatatttgataatttcaaagagaagtggaactgtatttcgtactcagagaaaaaaaatatcatgggtaatcgtttgacgaagcaaattgaaattattgataaggcaatcaatgaagatcagataaagtcaatgatttcactgattgaatatcaaggaataggttttacgaccatccaaaaatgttttgaccttgtgatgagttgcaaaattaaaccaactttagatttttaacatttactattacaataacttacgaagtacgggattcagttattgagtatattaaagctacatcccgattcaaggagaagaccgtaagcgatgcggtctattggttcataaagaataaacaggacagtctgtttaagagcccatatatatcgctaaagacacctttaatttcggcagacagcaaaagagagtgcaaatatcccattagacattgtacccaaatttgctctttacaagtatcaattacaggcgtttaagcaactgtccatgaattcttatcaagtaagtgttctctattatatgtggtcatcacacgcacatgaggattagcaaacatggttagatatggtgtcccatgtggacctgtagcagatttgatatagtgatttttaatcagcaggctacatgtatgcaattgtataaaaatataaaggtttgatacgtttttaaataggaatattccgtaaatagttagatttagtaggtaataataacatcaacctaccaaatactaaccatgatatgagtaatttgtttattgcccaataaacctctcacattgttccttcaccgcccgatacatcgaataatatgcaaaggcttcttctctatgcttcgtactactaactgacgctgcaacagcccacgtaacaatgatgacaataagaactacaacatagcgaagtttaatatgatagccacgtataaacatcccattgatatttggcggaataaccgttacaggactttttagctcattgattttggcaagtatctcatcctgccgttttaatatgcaatcggtattagcctcgatgttcatgcggttgagattgtaatcgcaaacgtgccgataaagatattcaaggagtttggacttctgcttgaataactcaacaagttttgggaaccacaatgaaaatgtcaacgtgtccgattgctgtttccagatatgattccttaccacagacaaaacttcgttccagcaaacacagaaactgttggctaccacatcatagatggttttctcgtcaatgttcacttctacagattgttccgatttgggaatagtgacattctgtttttcaatacactcttttagctcgttaatactttggcgcaaatttgcaagattcgcagctactacatcttctttcattatcttctacgtcttgagggtttataaaaagggtcatatctttgtttttccttgtctttgtcatctcgccatccttgttcattgctggttcctccacctgcaccggaagtgatggattggtgaggttgtaaaataagttctgcggtcacactgcccagtgttgtacaaaggcgattgaagctaaggtcagtatcaagtttagaacctgcaatgctaaattcatccatacaaaaggagactccacgtatcttgtcagagttttcagcatgattaaatcgcaaatctatcccttgacttttaagaacatgaaagaagtcataccatgagtgagatattgctaacgcatcaagagtagaggaacggagattatacttccgtagttgatgaggacgtaaacgactcttatttctggctttactatttttaggggcaaagtacaatccatattctttagtcaaagcccgacatactttagtattacgtattctttcattgctgtcggaaatgagattgccttcattgtctatccgattgaacaccaaatgacaatgaggatgtttcgtatcgtgatgtcgggctatgatatattgagtattgctaatccccatttgctccatccatttcttggctatctccaccatcagcgcatctccttcttcgttatcggggaaacggctaatgtcttgcgaagaaaaagcaagtgatacgtgtttcaccggactttttactttcgggcgcatggacgcttgtatctgaaaagaatcggctatggttttattgctgatggcacagacaccttcgtgtgctaaaagtgtggcacacttcttcttattcttttggtcattggcgtaattcacaattcctccaaaatccgttcttgttttaatcttcgctatcatggctattattctttacttgggtgataattctactgacttctgatatgattgaaaagcattgttgtttgactgtatccaaaccataagtgtgcatctgatgggcaatctggttgacattattggctataccggaaaggtcacggattgtcgatgccatttccggactgatgcgctgacagacctgacaatccattgccgcctgatggcaaaattcattgacagacaatcctgcctgttccgctttggattggatatagatatagtcgttctcggtaaacattacccgaaaacatttcgtgcgtttctgataactcgccaacttagggcgaccgccaagtttcttctccttcatatttatcttaactttatgttcataaattgattttttgagagtgggcagttccatccgtttaccgcataggttttagtgacactaaaacacaaacttgccactcaaaaaatcttcctatatttcccctgctctatccggcatagcttaccatctttaataaaggcttctatccacttgtttgccgtacttccattttcgcccaaagatgaaaccagtgcatcataatccttctttgtgaaagtatcgggtaacatattataaagggtattccttcgtgcataaacgccaatctcttgcgaagcggaattgaatcgtttggactgatttcctgacaaattctgataaatgaatacggcatgataaagtaaggtttcgcaaatactcatggctatagaatagtcatactcatggcaaaccaattgctctgtctcgtcaagtgaggaagaattacgatgtacattctccaaatgccggacagcggtcaacaccatcattatacgataagcaatcagtcccatccgtctgactacaccttgcatcttgttatctacttcgtcacaacactcctcattcacacggctgagatattcaataaagtgttcctgtaaatcggagggaagggaaaaggaataatttccctgccgtacaaaatcctcatgcagatggcagaatttatctcccaatagtttgaacattgcatttttagattgggagatgtcgcttgtggcaaacacatttcttatgcctcgtttgaagcggatgatatagaagcaaaagcgactcatcaatccgttttccgcatcaggtatcaatcttcttacctgttcgggagttccagccaaagctacagaaaccctcggattagccacctcgcaatactccctatccttgcgacggctcaaactgaccaactcatgatgaaatgcctttcgcaacacatcggaataattgccatagtccgacttcaaagcctggcttaacgtatcgccttccgattcaaacaacagtcctattccgtcattatctcccaatatcttcaagaaagagcttgcgctgctattggcaggaatgacaagcatacgcatgggcggctcggctggcatagaccttccactatctttcttgcctttgatataagcattcatcgcttccttgtattcctgttccaatcgttttgaaagttcatgcaaatggcggttgatgggagctacaagttctcggcataaggtcaatgctccttttcctataccggcatctgccacaacgaataggtatagattcggataaacaatacgctcatcgtacacaccacaaatattatgaaagcataccgacaaacacacaatagccccaatcagtatcgtatcacggtcatctaccgaaatggagttattgacaacctcatttagaaaaggaggaagatgctcaaacacacattcaggaaatgtaggaagttcttcctctgactttatccatttacccgttttaccattttggatatttggtaaaatggataaatgttctttgccgaacggagccaatgagattccggcttgatttgccaaatggaagaaagaacggatagtaatgccttgtcctttggattgcagacaatgcgtatattgtttgtctgtttcttccctttgataggctggataaaaccgactgatgcgatggtaatactcccgtccgttctctcccaagccatccacaagagcaaaacccaactctacccaatctttgtaggagggtgctatatcaatggcacgttgttctatctcccggacaacacattccacatcttccgccaccttattatatataggagcaatacttggcatatatgtctgctgtatttcagaagggacattctcccaatcttgggcggaaaatattttcttcgacatcatctttgtatttagggttaatatatgcttgtgggtcgtagggtaagaagcatgaacgagccacatcactgccggacatatccactaatggcaaacctgttgctttgatacagttggcaacagccttaaaataccgggaatgttcccaacctttcaaatcaacaggtattatccacttcaatccattaccggatggactgacaaataacagttccgtatcaaaatattcatgattgagcaattgctgttttagctccacgatattctccacatggtcgaaatccaaacacatcaatcctgagtgcataatcagttccttctcattgcgcttgcaaaataatcccgaaaaagtgcaatagtcaaaatgagtggctttgtatctttttgcttcgggagaagattgcatcgaacgcagggtttcggtttgcggttgcgcataatgcccgatgatataacgatacacatccacaatacctaccgcccttatcggttcgatgttttgaatgggcttgcgaaagaatgaaaaacaatagtctgttgtttccatcatctgataatctttttagattcgacaaatcgtctggcttcttccattaagtcatcctgtgtcttatgcgatttgttcttcaaccaatcatcaatctctgattgcagaaaagccaacgctttatttattttatgtacgggaatctgtttggttgatacccatccataaaccgtttgcttggctggatgtgatggaagataagcgcaaagctcatctatatccatccacttaggtgaattacttgtctgtttatgttgcaaggcatttactttggattgcagtacttctacggactcaatcaagtaggacaacgcattcggcatttcctccaatgaatttactttataagccattttcttcgtattaaagttgatgccgcaaaagtatagggatgtttatgagtgctaaataggtgcttgaaagccaccaattagccacttatttgccaccaatagatttagttttcattaacacaatgatttgctgaaagagataataaaataggaataaaccactattaggactaatactctcttcacagagaacgtctatacaacaaaatccccctcaaaaagccgatgcttcatgagggggatacggtggtaagtgtgtcgttgatactatataagtcattggtgctcaatggtggaaatctccactataacctataaagccaaattctctatatacagcgtattggcggctttctctttttgttcatttacgatatgcgtataaatctgcgtagttttgacgtttgtatgtcccatcaaagacttgatggtgtatatgtcaacaccgttttccaataatagcgaagcgtagctatgtctcccgcaatggaaggtgatatgttttttgatgccagatgcttctatccaaactttcagaggacgggaaatccaagaggcatcagtcaatccttcaaaaacgagagcttcgtcattgcttgagcgttcaccgcataattgaagggcttgttgaatgactggcttgtaatcgggcctttttgtcttttgctgaattacgactgcttgccatgtgcccttacttgtttgctgaatttgtttccatttcaaagtttgaatatcactatgccgcaatccagtgagaatagagaacaagaacgcacgtttcaaaacatcatccttgcaaggagtatcaaccaacatttgcacttcattcatggtaagcgcaacacgaggtttctctatatttgttattccctttactttcgcgcttatatcaacggtcagatattcatcaatgaatgcctgtttcaatccagctttgagtatagagaaataagtcgatgccgtgttttgtgagatggtacctttcttattccctcccattggagcacggagaaggaacatcttaatgtcttcaagcagtttaacggaaattgccttgaatggaattggctgcccttgcgaatacattttcaataattcgcctacacgcctccaattgactattattgaatcagaactgttgggatgacgtgtgcttataatactattgaaatacttgataaaatcctgttcgctccgctcattctgtgcagcgatttcattttccttatcagtgtataggatggcactatcgtattcgtgttggcgtaacttacgaacattgtcagcatagatacaagcctcttggtctatggttgaacgacattggataattccattcaaatcacgcttaggcttatagttgaatgttccatctggcaaaatgcgtgcaatggacgatttatcccaaacaggtgtggatatagtccggttaatggattccaccacacgacttgcccgtttagaacctcgcttataaaccgggtatgattctataatcaaataccactcttctttgtagttcgaccttctgagcttgacggtcactttggtattaggtaatgctttcttcataacgacttatataatttatcaatttcagatttgggaacataaacatagttaccgatttggcgtgtaggaatagaatgacggcgtatgtgcttaaatacactgctgtcattgatatggaacttctttgcgatctctccgatggtgtaacagtctttgggttcaaaggacaatgcttccttttttctctttctactgccaacctttgttttgaagtgttcatccatatactgccgactaatgcgtgtcagacgctgaccaaaattgtatgatggtatcaagccctgccgtatcatacgataaagtacatctttgctaataccgtaaatcagcatagactctttaactgtcaggtaccccttactagatgggattcgcctgaccaatgcttgacgtaccgcctctttctcttttgcgatttgccttttcttgtatgccttcttggaacaagcaggacaacaatactttgacatcaatgtggaaggagtaaagattttaccacactcctcgcaacttctttgaatggtgtaatttcctcttggcatattcttctcgttttaaatggtttatatcaatttaagttgtaccttatcgccaaataagacgtgtcgcaaacatgtcgcaaataagagataaaaaagcccatagaaaacacatagcaaccatgaaccccataaacgcaaaaagcgtgcaactcattgagctgcacgcttttgcttattgtttattatctgtatccttatcggaatcatttgacttcctcaaaatctgcatcctgaacattgtcaccatgcttgctattatcctgaccagcattctgacctgcatccatatcaggaccagcctgtgcaccaccctgagctccgccttgagcgtacatttcagcacttgcagcctggaaaacagtattgatttctgccatagccgtatcaatagcagctaaatcctgagacttatgagcatctttcagtttctgcaaagcagcttcaattggagctttcttatcagcaggcaacttatcacccaattccttcaactgattttctgtctggaaaattacgctgtcggcctggttcagcttatcaatcttttcacgttctttcttgtctgcttctgcattagcttcagcttcagccttcatcttttcgatttcttccttgctcaaaccgctggaagcttcgatacggattgcctgttctttacctgtagccttatccttagcagatactttcaagataccgttagcatcgatatcgaatgtaacctcaatctgaggaacaccacgacgagccggagcgatacctgacaagttgaactgaccaattgacttattctgagcagccatcggacgttctccctgcaatacatgaatagttacttcactctgattgtcggcagcagtagagaaggtctcactcttacgagccggaattgttgtattagcatcaatcaatttcgtcatcacaccacccagtgtttcaatacccattgacaacggagtaacatccaacaacaccacacctttgatttcgtctgtcaaaacagcaccctgtacagcagcaccaacagctactacttcatccgggttcacacctttagaaggagtctttccgaagaaatcttctaccagtttctgtacggcaggaatacgggaagaaccacctacaaggattacttcatcaatatcagagttgctcaaaccagcatcgctcattgctttcttacatggttccagacaagcctgaatcaatccgtgagccaatgattcgaattttgcacgagtcaaagtcttcaccaagtgcttgggcacaccgtttaccggcataatgtacggcaagttgatttctgtgcttgttgaagaagaaagttcaatcttagccttttcagcagcttctttcagacgttgcaaagccattggatcctgagtcaaatcagcaccttcgtcgtttttgaattcctgtaccagccagttgatgattacctggtcgaagtcatcaccacccaagtgagtatcaccgttagtagaaagaacttcgaatacaccaccaccgaattcgaggatagagatatcaaaagtaccaccaccaaggtcgaatacagcaatcttcatatctttgtgagccttgtccagaccgtatgcaagagctgcagctgtcggttcgttaacaatacgttttacttccagacctgcaatctgtccggcttctttagtagcctgacgttgagagtcggagaaatatgcaggaacggtgataacagcttctgtaacttcttgtcccagataatcttcagcagtcttcttcatcttctgaagaatcattgcagatatttcttgcggagtgtacagacgaccgtcaatatctacacgcggagtgttgttgtcacctttcactactttataaggaacacgtgtaacctctttctgcacctgatcccagttttcacccataaaacgtttgatagagaagatcgtacgtgtcgggttagtaatagcctgacgtttagcaggatcacctactttacgttcgccgccatctacaaatgcaaccacagaaggagttgtacgcttaccttcactgtttgcaattactacaggttcgttgccctcaaatacggcaacacaagagtttgttgttcctaagtcaataccaataatttttcccatgatcgttattctttttatttattattattcaatttctttttgtccggttgttttctttctctttgtaagggctttcaaacggacgctgattaaaaaacaaaccatgtgccaaaaagaaatcggacgaatacgtgacatattttctgccaaaacgacagttttaaatcgaaatgactgctgtcaagtcacatagaagccagacagctatcgactcattaaacaaatggaaacagctctggttcaataaagcaaaagaatagatcataaaggaataaaaaatatgcctgtatcgttatgtgcgacacaggcatacctatttaatataatacgtatatcttacttttcaagtacaatcaccaacgcattatttgcgtcatacaaaccgattccaccaccggaaagtttatcgaacgacttcacttcattcattgctttcagaatcttaccttccacttccatatcagggcaagccatcattgtgctagccaccccagggaaagagattgatttagcattagtagtgctagtttcaaaaccaccattaatcaagttacatccggcattgccatgaagtgttttctttttcacatcaaaagcaatgaaaggttgcttttccattcccgaagtaattgcttcaccattcacttcctttattttccattctccgttcaatactgatagtttcacgtcagcctcctttttttcaagaactacaaccggacgattggactcattgcaaagaaacattttatccttaccggctttcttataacctttcacctgtgcaagcgcacctaacacatttctctcggtagtcatgtccggacacatcattctggtgctagccattcccttaagctccatgctgcctggcttggcattcacgtcaaagctacccatcatacggttacatccgctgttaccggatactcttccggtcgctgtatcaaaagtaataaagggaagggttctgctttcgcccggagttactttcgagccgttaacttctataatattccactcaccattgattgaagccaatgggactgccttctcaaccgaacggcatgaaaacattgcaagtactgtgctggcaatgcaaattgaaacgaatactttcttcattttgttataacgtttaagttaaaatcgggggcaaagatatcaaaaagattgggaaataccatctaatacgatataaaatacatacatttgccattatctataaaacaaacaataagattacatagttcatctaaagtaaataaatatgagaacaatcgtcctatttctaatcctgtttggttgtggttcctctcatatcacagcgcaaaatgattatcttgttactactatttccaatcaggaaggccctctaagtgaagaagaacagttcataaaagagaacttcccactgcaacttttatgtaaatggacacccggaatgaaattcatgtttattccatccggacgtgacatgttcctccctacccttttggtgtatgagacagaaaaaggggcagacaacagcgttctgaaacacaagattcttactttcgccggatatgaagaaaaatctcaagaactatcaaatgacatgagctattccactcgactcatcttcgaatgtgacggagaaaaatattattatgagattaaaaatacacgtccggatgaaatttgcgaaaagaatccccgtgcctatatcaacggattagttaatctgaaagacgtagacacggcaaaagaattgctgacaggcagaaagatatatgttcagtccgatatggcacgggtggacgacgccaatagttactccggatatcggaaagtgtctattccggtcaacaccgaagcaaccattaccgccataggagttggcagtcagtcatatcccgtgaaaatcatatttcaagattcgcagggacattcctattatctggaagtagctctttcccgcactaattccggtatggacgtgagcgatttccaagctgaaaagaaaatgagatattttcccaacgccatcagtttcagtagcaaaaagtccggaaatctggaaaccttgaaagacaaatatattgatctgaccgtctatccgaaacggacattggctgtaaaaagagtcttcagccttgaaaacaagcaaatggaaaaccgcatacatttgcctcgctacactgttttgaaaataaaagaaataaaaatctccggtccgggaagtctggttatcctctcactggaggattggcatggatcactttatgaaacagaggttgatttgaaatatgatgttatcgtcaaaaacgagaattatattgaagaccttttcggatttggagacatccatcagaagtatccggctatcacagataaacattgggcaatcatcgcacggggtgatttggaagaaggtatgaacaccgacgaatgtcgtctgtcaataggtgatcctgtagaaatacagttaaaaaaagacagtcgtttcgaaacttggttctacaacggaaaaacgctggaatttgagagtggcatcttgcaacgtttcaaataaaaaggagtagcgacgcggtgattatctgaaaataatcacgtatatttgccaagctaacaattctaaaatcttaatttttgatttataatttattaattaaaagaaatgggtagagttcttattatcggtgcaggcggtgttggtactgtcgtagcacacaaagtggcacaaaatgccgatgtattcacagacatcatgattgccagccgtacaaaggagaaatgcgataatatcgtcaaagctataggcaatcccaatataaaaaccgccaaagtggatgcggataatgtagatgaactggtagctttattcaatgactttaagccggaaatggtaatcaacgttgctcttccttatcaggatcttaccattatggaagcctgtctgaaggcgggtgtcaactacctggatacagccaactatgagccgaaagatgaagctcattttgaatacagctggcaatgggcttaccacgaccgtttcaaggaagcaggtctgactgccattcttggttgcggttttgatccgggagtcagtggaatctacacagcctatgcagccaaacattatttcgacgaaatccaatatctggatatcgtagactgtaatgcaggaaatcatcataaagcatttgccaccaactttaatccggaaatcaatatccgcgaaattactcagaacggacgttattacgagaatggtcaatgggtgacaaccggtccgctggaaatccacaaagatctgacttatcctaatattggtccacgtgattcctatcttctttatcatgaagaactagaatcgttggtcaagcatttcccgactatcaagcgtgcccgtttctggatgactttcggacaagaatatctgactcacttacgcgtgattcagaatatcggcatggcccgtatcgatgaagttgattataacggaactaaaatcgtaccattacaattcttgaaagcagtattgcctaacccacaggatttaggtgagaactatgaaggtgaaacctctatcggttgccgtatccgtggcatcaaagacggaaaagaacgtacttactatgtctacaacaactgcagccatcaggaagcttacaaggaaacaggtatgcagggagtcagctacaccaccggtgttccggctatgatcggtgccatgatgttcttcaaaggcgaatggcaacgtccgggtgtaaacaatgtagaagaatttaatccggatccgttcatggaacagctcaataagcagggactgccttggcatgaagtgtttgataaagacctagaactataatagaacgaatcagaatgaagaatataggagataaagcaccggaagtattaggcatcaatgaaaaaggtgaagagatccgactgagtgcttataaaggaaaaaagatagtactgtatttctatccgaaagacagtacatcggggtgcacggcacaggcatgcagtctgcgtgacaactattccgaactgcgcaaagccggttacgaagtaatcggtgtcagcgtagacagcgagaagtcgcaccaaaaattcatcgataagaataatcttccttttacactgatagccgatacggacaaaaagttggtagaagaatttggtgtatggggagagaaaaagttgtatggacgtgcctatatgggaaccttccgcactactttcctgatcaatgaagaaggaatcatagaacggattatcactcccaaagaagtgaaaaccaaagagcatgcctcacagattttaaatcaataaatccattaattataagaataaggtatggcaaagaaagacgaacttaattttgaaacagataataaaatggcatcaagcgaaaaactgaaagccttacaggctaccatggaaaagatagaaaagaacttcggtaaaggttctatcatgaaaatgggtgatgatagtgttgaacaagtggaagtgattcctaccggctccattgctttaaacgtggcacttggcgtaggaggatatcctaggggaagaatcatcgaaatctatggtccggaatcttccggtaaaacgactctggctattcacgccattgccgaagcacaaaaagccggtggtatcgccgcttttattgatgccgaacatgccttcgaccgtttttatgcagcgaaattaggcgtggatgtagacaatctctggatttctcaaccggacaacggagagcaggccttggaaatagccgaacagttaatccgttcttccgctattgatattattgttattgactccgtagcagcattaactccgaaagcagaaattgaaggcgacatgggtgacaataaggtaggtttgcaggcacgtctgatgtcacaggctttgcgtaaattgaccggtacagtcagcaaaacacgtacaacttgtatctttatcaaccagctccgtgaaaagattggcgtcatgttcggtaatccggaaacaacgacaggtggtaacgcattgaagttctatgcttctgtacgtatagatatccgtggcagccagccaatcaaagacggtgaagaagttcttggtaaactgactaaggtgaaagtggtgaagaacaaagtagcacctcctttccgcaaagcagaatttgatatcatgtttggtgaaggtatttctcactccggagaaatcatcgatttgggcgcagaactgggaatcatcaaaaagagcggttcatggtatagctacaatgacactaaactgggtcaaggacgtgatgcagccaaggtatgtatcaaagataatcccgaacttgctgaagaattagaaggattgatcttcgaagccttgaataaaaaataagttgtctcaaccgattcaactataaataatataagctgtctcattcgatgttttgagacagcttatttttagcttaaacataagaaatgtcccccatctgaatcctcgcagtacaattcagatgggggacatttctttcactttttacacgaaatagatataggctaatgtacttaaacttatgaccacccataacaaaacgccttggatcaaaggtttgacaccgacagatcttagaacatccaaagaaagggaagcacctataaaaaacatggtaatagtcaatgtcttgcgtgcaattccattgatggcggcacctaactgcggcacgccattcagcaaatatgtattcgcaatcatagctagaataaagaagaaaataaaccagggaatacttatcttctgacctttacttttaaatataaaagaagtggcgaatgccattggtatgatccaaagagcacgagtcaacttgatagttgtagcaaccttcagtgcttcttcaccataagcagcacctgctcccaccacagaactggtatcatgaatagcaatggcagcccatgtgccaaactgatgttcggtcatatccaaagcatgtccgatagccggaaagataaaaagcgcaatagcattcagaataaagatcgttcccaatgccacagacatttcactgtctttagctctcagcaccggccctattgccgcaatagcactaccaccacagatagcagttcccgaactaatcagataggaagtatttctgtctatcttgaagattttacgaccaataaaccagccgatgagcaacgtgcctaccacagaaataacagtaaactccatcccttctttaccggatgccaaagccgactgaagattcataccgaatcccaatcctactacagaatattgcagcaaatatttagatgtctttttattaaatttgggatgtgcctgtccgcaggttaatgcgaaaataagtccgagaaacaaagctaccggaggagtcacccatgcggaccatgcttgtaaaccaggaatataatctaaaaataagaaaaaagttaaagtagaaagtattgcaacgtaaattgtcttgttgttggtttgcaacgtttttgtagcgcttgaaatcatttttttatctttttataattttgcgggtgcaaaggtacggcaaacaatcaagacaacccaattgtttctaattatgtattataactttttgttatagccacttctcttattgttacattatgctcctacgatgtcctttccaaatggtgataatgctaacgcagccaacttaaagtgctgcaaaccaaagggtatcccaatgatggtgatacataggacagctccaaaaaccagatgtgacaaacaaatccaaataccacccaaaaatatccataaaacattcatcagtatataaaggcatccgcttgaacgcccaccactccttacttcttttccaaaaggccacaaagcaagtcctgccaacttcaatgtttgcataccgaaaggtatacctacaattgtaagcatcatcaatatacttgagattaaatactccactgccgtaaaaataccgccaagcaataaccataacaaattcattaaacagcccataagtatcagttctaatatttatttagtattttctttgttgtctcatccagcctgccttgaaaatacagatcaattaccttttgaaataaatcatcagaagcaacttcattaaaaagtgtcatacacgacagcactttcattgcgtccaatcctccgaatacatctaccgcagtcttacctttcagttgcaaaaatactgttgttatttcacggagtctcactcccaaaatgggatgagcaagatatgcttcggcctcctctttaccacaaattccataatactgagaattatagctcattcccagtccttttaactgaggaaatatgtaccaaatccaatgagaatattttttcccatttttcacttctgcaagtgcttggttataaacaccttgctgggcatctagaaaacgctgtaatttataatctaccatatatatcttctcataccacattcttgatgtatacaaagatatgtgtattttgcatataattgatagattattctaaaaaagaacacgaatcaatcctttagcaatctaaagatatctttggattactaaaggattaatggaagaaatgtaattctgaaataaaaattactctttaacaggtctaattgccattttaatcatacttgcattccaactagcattataataataacttgtagaattataatagaaaacatagccaaaacgtccataagtatcaccgtaagattctccaacccaataataaccactattctcgtccactagctgtgtagctcctgccggtccacttgccggaagcatataacccgtagagggtaaaaagatgctatttccgttactacctgttactttcataccactgactccgtttattgttgctcttgtccatgtacatttcttaatcaaatctatttgctcagccttattgggcaatctccatgagcctccccacattgcacgtgctatgtcatatttgcttccacagatattatcaatattaggagcctgataatcaggcataactcctacattatcaacatctccccatagaaaatagccacctttctccgaagatgttattgctcccaaattaaatgaagcccacctcacactaagtcctaaatttacagctttataaagtgattgttctcccaaaggaataactatttctgttccatctttgagtattaatctgagttcatcttccgttgcctctacagattcaaaaaatgaatcaccatccattccagaagctttaactgccttcccgtattcgtcaagcaatttggaataagtataacctttatcatagcttatgatccaatatccatcagagtctactttcaatagtggcgtgatagcatccgttcctgatgcaggaatcttgtttccatcactatcattaagccatgttgtttcaccattaatagtttgtacccaatagtatctaccgttataataacggacattgattacgggagcatcttttccattaatcccatcttttccatctgaaaccgtgatatgcgaaccatctgaaaatgtgagtgtatagccatctcccaatgtagtaacattggttagatataacctattttgaagtgcccctactaaagcactaatcgatgtgatatcattattcaatgctttcaattggttctcaatagaggtcactctgtcatctaaagaattaactctatcccataattcgctgtcatcgtattcgttacacgcagttgtgcacattaataacagcacaaactgataaataaatctaaatgttttcatttttttatttttaatccaaacttagaatcgaagatttcgactatctgatttttatgagtatattttatctattatccaaatacttatttgccgttttagtctattgtgcagcaatacttaccttaaaatatccatcagggaaattctgtatgtaatccccactaaagtagaactgcacatatgctacatctcctgagccaacatatctcaacataggatcataaatttgaccagttcctgtaagtgataatgttccactaccggtaagcttataatttgaatcatacacctcataacgcaatcgcttgctatagtttacatcattaaaactaccaagatactctaaatttatatgcatataggtggatttcctattgaacttgaacacatccacatctctagtagaagacaatgagaatttcattgactgcccatccttgatggtgtttgcgttagagaaattattgttatactcactctctatatattctggtattacatttacatagactctctcatttccgctacttaaacgtgttatgtatcctgttggtttaattccaactatacctgttttcaatcctgtagcagtcccatctgcatcaatagaaattactgatggttcagaaacaacatttacaggttcatagaatacaaaatcactcagattgccaaaaatattcaacacagaactaccttgcttagaagtatagctgattttctgagattctcctacggccaaagttaacataggataaatagagtaagtctcacctgtattactccaagagaaatcagatattcgagaatgaacagtatattctttagatactccactatttttatctttaacaacaacatttgcttctccataacctacaattttaacagttgcattgccaccactaccactgactgtcaagactctgatatcagaagaactccattcataatccgttacagcatcacttggtttacaagtgacaaaaaagttataactatcacctacataagcatataatgttccattgaacagtatatcaagagcagtaactttcactaccgttgcctgtatgacggttactgtttccgtcttctttccatccgaagaagtaaaagttatcttgccagtacggctcttacctgtcgtattggacattatattaaatttcttcatactgtttgatatagagcgtgtaggtatttctgtaatccaatcattagaaattgacacaccatagtcgatattactcttcagttgaacgttaatgcttgtagtattcccatcaatattataagaagactgagtaagtacaagaattgcgccaccactctgataaaccttcagagtatcactgatgtcgttgtatttgaaatagatttcaccttcacgcttatcatattcatcactgcttgctacagaaaatgcagatgttgtttttgataatccacgatgaacattaactgaagagttagccctactaatccagctgttgcatgaaggaggaatttcaatagagtactcaacattactattaacatcaacaaaaaatgttccaccattttgggggacttcaaccttgttgtttgaaagcagtatagcatccttctgattttgcttaatggaaacactttctttcttgtttccgttggcatctttgaatactataacagcctcacggtcagcatatgtgttatttgcacttatctcatagacaagagtatggcttgaaactgcacgagataaatttgcagattgaatccaatcaacattaggcatatctatttcatattcaaagttgctgctgatgtcaattgatgcccgtccaccatcacagccaaaagtatattcattttgagaaagaataagaatagcagaacccgtctgatacacctttactgtttcatccgattcgccggaagtgataatgatttctccttcacgtttatcatattcttcacttggggatattgcaaaagaataaaagctagtagacaagccacgtgtacgttcagaaataactggttcaatccaagtcctgctattttcagcaacagtcacattataatcaatatttgactttacctgtaaattaataattcccccatctttatcaacctcaaatcgattcgatgtcaatgttaaagcatctttttgtttctgattgatcatgatgcttttagttaattcatcaacactgagctttaaaacaacattcctgtcatcatatccagtattactagccaccacaatagttaatgtgacatttccagctttaccactcgaaggagacactgtacaccaattatccccattctgcgtctcggcaagggaaactgaccagtccttgttagtggaaaaagaaattgtagcccgttcaccttctgatgagacattgattccttgactaaaaattgtctcacattcagatgtaggtacgatttctgtttctactctaacttcattcttttcgttctcttcaccgcatgaaaacaaaaagacaagacataaacacattaataataatgttattcgactaattttaaatttacggttcatattatattactttaaaataaactctgctgatgagattccatatctttctccagtttctgataataaatctcattaatagaatcaaatcctaaacgcaatccaactaagtatactgctagtttgtactccttttcatatagcctcttaaaactatttctacaataatctttcattaatgattgataatttggcaatgaaaacaaatttaataagtaaaaataaataggtatcaaaatatattgtcgtatacctttccgtgtacatttctcaatatatctctctgcacatttattgttctttaattcacatactatatattcaaaatcatatctactctgtcgatcaattagattcaaaacttttaaaatctctgttttcggcatagtaagatattcttttttaaaagtatagttaacaaaaacatgaaccgaatcataaaaatatcctaggcaattactgggatatggctcgtgacgttcatacattaataaatattgccaaattgagctattctcatccaaattttctttttgaaatcgataatttgtgaccttaataatcaaatcctcatcatctaaatcctttaaaggtttttctactttaatacccaaaatctctaaacaagcagatgcacctttgcacatattttcactaaataaagactgagagaaatcatctacataagtcccccacaatggttctacaaactttatcattttattaaagctcatttccatatcttttttagcaactaaatctaatggaataatcgattgtacttctttatattcaatattattcttgcaatctcttttaagccatttcctctcacgaagaaatttaataaaaacatattcacttgtataatcaaaaggagatacattcttcaacagctcccttatatattcttccggtacactatcattgccggatatagttttcacgtgaatagtgcataacacaatatatcctttcttaaacagaatatttaaatcattacgatgtataatgcccaagtattcatatctcattttagccataatcaaaaatctatatttatatcatccgacaaattgggatgcaattcattacttatcgaaatatttgcacatatagtgctatctgaactaaataaagaaacataacttaaaggcatgcctgtataagtgatgtatagattatttctgctccggctcattgcaaccataaacaatttctgagtaatattactatctccaggaatatataagtctgtatttgcaaatggaataaaaacattatcaaaatccaatccttttacaccatgataagtcataataacaatacgtttatcgttttccgcagctaataacgatccataactatttacaacgcattctataggaacttgattttcctttagatgatcattaagccgtttaaaataaggttcataatattgatcaatccatttttcccatacaggtttatgttctaactgcaaaacggtatcacaaaattccaatactttatctttagtaggaaataatattgcacaactctgattacgattaacaaacttacgtgcctccctcattatatattcgacttcttgatccacaaattctgctttgcataagcgtatttgcgtatctcttttaagcatatacctctttgcactaaaaatattcatcgatggtatcattttctgaattgcagtgattatagaacgagttaacctatatacgtataaaagtccccaatcttcagaatcaattaattgagtaattttctcaggaataactacagcttcttgatattgagggtcctttgaataaatagattggttactatctcccgctacaatcagcatataccttgtctgatctttcatctttatcaaaatacgagatgttaaatcttgaacctcatcacaaaaaatataatcatattttctctttgtttttaagaattcatacatcgtgacaattttcacatttgttatattcaactctgcaagttcagctttgcaaagttctatcaacgaatgagtaaacaccactaataatatttttgcattttgagtagcctcattattcaataagtatttaatggcatatacaagcaacaccgattttccgcttcccggaaacccttttatccaaatattctgaccaacataatgattatctttcagtttctttagaaaatccttttgttgagtatccaaactttcttctgtaggtattctagtactcataattagtctcctttcaccgctactgtattattagaattataaaaatcatccaatgatatcctttttgccttttttctgacctcttcagcaaaaatagactcacctaattcctctgcagcacttggtaaccaagtataatctacatcactgagggtaccattatcatattgagccttccatatattataagctttctttatcttttctactccttctattttctttccttcttttttttcatactttccaagttcaaataaaggatgtggcttattcgggcacattgctaaagattcgtgaatatattttaagaacattgaagtatcaatatttttatagcgataacccaaattaaaagcagaaaccgcatccttactatattcataagctttttctccgtaacgtagtgctttcctattatttcctgcagaagaaaagcagcatcctaatttattataactaatagtaccaggatataattcattacattcctcataagtttcagctgccttcaaatttagagttgcgttttcgtaagcttttgccaattccaacaaacattcttttgatggtactcctctattattagctgttgtattataagcttttttctctgctctcaatgctatcctctcctgtgaagttaactctttatttgcaaaaggattaattgcacttactaaacaagtttcacttccaaccttggcattaattgtcagtaatttatctgcagttaattctaattgcagcttaataggcgtatccaaagaaaatccattttgttcatttgaagttataaccaaattagtcaatattttattctcattactgatacaaatagggaattctacagttttttggccttcttttacaatagcaagattatctatttcaatagtatccgtcggcatgacagttccggcaggaaccaaagtcattagctgatcattcttagtaattatacatattggttcactggttattggctgtactatattctgtccaaaagagttatagatgaacgaatgaattgatgcacctttagacacacaagtctgaagatcaggaaataacaataatttggaatatggcaaccatgatttcagagcggcttgtacataaggattaagactactcccacccaccaataaaacataatcaacatcatctacttctaatctagccttacgaatagaagtttttacacaatcataaatactattatatatttgtttttctttttgaataacatcgcttttcttccttgtgaaaactttcataagttctgcgaattggatagatgttaaaaaaatctcatccatgtacaatacccctttggatgtattaattcgaatatcctttacagaaactttatattcttgttcaagacctgacaaatcgaaactatccctcattagacttatggctttacatatccttatttttaagttttccgcagtagtcaaaagagcatttatgatttttttcttctcagacataataaagatatccatatctaaatggttgtgagacaaaagttcagggtacaatatctcataagcaatgtatctatcaatatcatttcctcccaatttttcaaatttagatattgacaaatttttagaatatactcccttataatctacacctatttctaatattgaaatatcacatgtcccagctccgaaatcaaaaactaacattttaggattaatatctttaggaattaccactgcttcattattcatctccgattcatgaatatagtttaaaaaagctgcgttaggctcatcaatcaaggactgtttgctaacatccatttgattgcttattaaagcatcaaccaaatcgcgtcgttgattcgcctcgaacgaagcaggaatacttactgcatatttaatattctgacatagtcctttttgttcgacataggattctatctctttctttaagaatctgaaaaataaaatagtagcatcctttgcattttggattcggacagatttatctttacccaaaatactattacaatattttgcacctaaatcttctcctaactccatcttaaaagagtaccagacatccttgtttttttctaattcatactttaagtttgcagctccctctccgacaagtacccgattatgataaagagctataactgtaggcactttttctccagtaaagtccgcaccatcactttgcttctgtcgtagattcattacttcagttacaactattctcttttcattatcaaaatatgaataagaaactactgtagttgatgttccaaaatcaattcccacgtaagtagcttgttccttatgaattgtgctcaaatccgcagttacaagattctccactgtcaataaaataggcataatctctaaatgttaaaataacaacgtttttgtgtgtgtttagaaattagtgaataattatatattcatattaaaagtaataatgtttatcagtattagtctattatactccaatctatctttatatatattttaccaaaccattcattagaaaaattaaatgaaagatacttctaaagaaaagtaataaaacatattgcatatatacttttttagtattactaatatgttgtttataatcttctctaatattagagttactgaagcaggattgctgatatacaaataacacgcacaaggaatttcctaaaatctacgattacactttccataatttactcaaaataaccagcagattcccgaaccggacggttcattaattagataagtaatactataaaagaaaaagcgcgggaatctgtacctgttactcgtcccgctgtttgaggccttcgaactgcccgtagtagtctgaacgagcaacgcagaagcccacgccgatatgtataacaatccacgtatacttttatttcaaagtacactcaagggtataaacatatcccgtagacatctactgttgctttgttttgactactgcttaaagtgttcgaagtttcaaacagccaaagacaaaacgtcaagtaaacgtctttctttatataatatatctcccacaccaccctaacctcacgaattgaggtatcggcgtgagagacaatgcaaaactataaaaataaaattaaatatcctacttcatgccattctttttccaaaaacacacatatcttgggcaaaagcaatccaaactcatttaaatattacctcctattacttattccccaatctattaacaaataaattattctttattagtagtaaacttgcttttatcaagaagataagttacctttgtttaatagtaaactataaatgcaaattccaattatacaaatgcaagttgcaactttaaaaacgcaacttgcatttataaaaacaaaagcatcaattatagtttataattaaccaataagaactttagtattggaagaaaggaactttacctctaataccaaagaatttatctattaatactttagaaccaagacagtatggcacgatacattatggaagagatgcccgacattcagaaaacgggcaaaagaattacttatcccaagtttgcacggatagacaatgcaagcattaaggaactggcgcaacgagtaggagacgtcagcggcttcagtgccggagacatagaaggcgtattgctccagaccgccatagaaatggcgcatctgatggcggaaggacgctctgtgaaaatagacggaatagggacttttaccccctcactcgccctatgcagagacaaagaacgagaagaggcggaagaaggcgccaaacaccgaaacgcacaaagcatctgtgtaggaggagtgaattttcgggcagacagaacgatgatcagaaacattaatgaaagatgccggctggaaagagctccatggaaaccacaacgctcctctaaaaagttcacaccggagcaacggctgacattagccctgaaatttctcgacgaacacgctttcctgactgtacggaattaccaaagactaaccggactgcttcagacagctgctactaaagagctgaaacaatgggctgatcttccggaatccggtattgatattgcaggaagaggttcgcacagagtctatgtaaagaagaaagttgccactgaataaaaaataatatatgatgagagataccctgaaaatagatgagagataactaaaaatgaatgagagataactgtttttaggcgtattttcactataaaatgatgagagataggttcttgcagaagtatctctcattcgataagaatcttattatctgatatttaagaaaaaacaatgagagcaatgagagataaaatctttttttctttttctgtagaaggtaagattcgaatgaaaaagcagcgattatgaccgaattggaaaataaacgcacaaaaatggaataatcatcttaaaagaactatctttgatatttgattgtttgaggagctagaatctgaaaaacaaaaagaagcaaactttatagttatggaaacagtgaaacaaataccatatggcatgtccaactttgaggacgtaatcatgcaaaaccgctattacgtggataaaacaatgtatattcccttattggaagatcaagccaactacctgatattcattcgtcctcgacgtttcggcaagagtctgctgcttagtatgctccggtcatactatgacctttcacaaaaagataagttccagcaactattcggcaatctctggatcggtcagcatacaactccgcttcaaggcaaataccaaatactttatcttgacttttccaaaatcggtggcagtattgatgaactgccacaaagattcgattcttacagcgctgtgcagctagacggttttctcaaccgatatcgtgaatattacacagatgaattcatagaacgtttcagtgctgcggataaaggaattgataaacttcacatccttgatgacgaagccaggagattaggttatcccctatatcttattatagatgaatacgataacttcaccaatgtcgtcctcaacgaaaaaggcaacgaaatatatcgtgccatcacccacgcaagcggcttctaccgtgatgccttcaaaaactataaaggaatgttcgaccgtatctttatgatcggtgtcagtcccgtaacgctagacgacttgtcgagcggttataatatcggttggaacatcagtaccagtccggtatttaaccagatgctgggattttctgaaaaagatgtgcgcactatgttccaatattacaaggaaacagggcaactgcatggagatattgaagagatgattctggaaatgaagccgtggtatgacaattattgttttgcacgtcaaagcctgagttctgatcccaaaatgttcaactgcgatatggtactttactaccttcggaatcggattcagttgggagcatctcccgaacagatgattgaccctaatacccgaacggattataacaagatgaaaaaactcatccaactggatcgtcttgacggtaatcgcaaaggcgttatcaaacgcattgccgaagaaggaaaaatcatcactaacctattccagtctttttccgcagaccagattacgaatccggaaatatttcccagcctgcttttttactatggcatgctgactatcatcggaacacgtggaaatctgactatcttaggaatccctaatacaaatgtccgaaaacaatattatgaatatatcttggaagaatatcaaaaccaccactatatcaatctgatagatatagagatactcttcaataacatggcttttgacggtgaatggcgacctgcattggaatttatagccaaagcttataaagagaattcttccgtgcgcagcagcattgaaggagaacgcaatattcaaggattcttcactgcctatcttagcgtcaatgcatattacttgacgacacctgaggtagagttgaaccatggcttttgcgacatgtttctcatgcctgacctgcaacgctatgcagaaattgcacacagctatatagtagaactaaaatatctgcctaaagaaaagtttgatgcccagtctgccgaacaatgggaagaagcggtggctcaaattcatggttatgccgcaagtccgaaagtccgtctattatgccaaggcacgcaacttcactgcatcgtaatacagttctgcggttgggagatggttcgtatggaagaagtctgacctacaagttcttgctatgatgccccgcaaagcgcataaaaacttgagataatcctccctcctgcccttgtagctgcacaaaattaaattcgcgcaacattggcatcccttttatctcaactacccgtaaagtgccggcaacaagttctttatgcaccgaccggatagaaacaattcccatacaatcagtatgttccaaaaagagcttgatactctccgtaccaccaagatacatcagaacattcaaagaagacagcttcaaattgtgttgcgacagggctcgttcaaatacatccaacgtccccgaacctctttcacgcaaaaccaaagggatattcggcaattctgcaggtgttatctcctcctgaatatttagtttactgttcacatgcactaccgcaaccagttcatcttgcaaaaacagagtatatttcagattaggtaaacgaaaaataccttccaccaatcccaattcaatccggtgttcctgcaaagcgacctccactccccgagagttcccattaaggacggaaagattgacttgtggaaacttcgctataaaatgagccaataaagggggcagaacatattgagcaatcgtcgtgctagctcccagtttcaactctccaatatactcgttatgcaacaaatgcatttcatattcaagtcgcttgtaatcatctaaaatcttttcgctatgcttcagcagtaattcaccggcaacagtcaaagagattttactcccctgacgttcgaacaaacgagcctgataataagtctccaattcctgaatatgcttagtgatagcaggctggctgacaaacaattcttgcgaagcctttgtgaaactcagattcttcgctacgctctgaaatacttttaaacgaaaatcggacaccttttatttgagttatttgaggattaaaattaaagatcaagaattaaacacaaagactatagttcttcagctctgattcctaatgcctgcataacaggaaatgccaacatatcccacttatactctacctgcgcttcaggctcattcatacgaaactggataatctccttgcctttcacttcatgcaacgcatcggatactttctttccatattcttcattgaaagaaacgacaatcatccttttcacatcagccgaatcagcaacgatagacaataaatccaaaaacaaatcttcgcgtgaaaccatcccttccgaaggaacacttgcaaatgaatattcaccataaggactctgaaaagcgactccattcaactccttcaccaaatcggaaggatggcaatgtacaagctgatcggactccttatcgtaaacaaaaagaaattgtacttcatttttcccttccgtgattccggcatccagagtcagataagtggtcaacatagaaaggtcgatatcctgtaaagaacgtcgcaaagtctcttcaaagtaacctttcatatctgtaattacaaaattcaagaaagcagcatcaatcaacactactgtttcagacagttttatttgaggtttatcattcataccttatttataatatgattacagcggataaagatactacaatacttttatttattcacttcatttcgcggcaaattcgtcagtatcattcagatgaaaaaggtcattttgtcttctaactcctttataatcatgttattttgtcatatttttctacttggcaaatcttttgagccccttcaagtgttattaaaatcatgaaaaaagaaaggagaacaaccatatgaactttaacaattttaccatcaaatctcaagaagcggtacaggaggccgtaaatctcgtacaaagtcggggacaacaggcgattgaacctgctcatatcctacatggagtaatgaaggtaggcgaaaatgtgactaacttcatcttccaaaaattaggaatgaacgggcaacaggtagctctagtcgttgacaaacagatcgaatctttgcctaaagtatccggaggagaaccttacctaagtagagaatctaatgaagtattgcagaaggcaacccagtattctaaagaaatgggagatgaatttgtttcattggaacatattctgctggctttgctaactgtaaaaagtaccgtatccaccatcctaaaagatgccggaatgacggaaaaagaattgcgtaacgctatcaatgaactcagaaaaggagaaaaagttacttctcaatccagtgaagacaactatcagtcattggagaaatacgctatcaatctgaacgaagccgcccgcagcggcaaactggaccctgtaatcggacgtgacgaagaaatccgacgggtactgcaaatattaagccgacgaaccaagaacaatccgattctgatcggtgaaccgggtacaggtaagacagctatcgtagaaggattggcgcatcgtatcctccggggagacgtacccgaaaacctgaaaaacaaacaggtctactctctcgatatgggagcattggttgcaggagcaaaatataaaggagaattcgaagagcgactaaaatcagtagtcaacgaggttaagaaatcagaaggtgatataatcttgtttattgatgagattcatacactggtaggcgccggcaaaggcgaaggagcaatggatgctgcaaatattctgaaaccggcattggcacgtggagaactacgttcgatcggtgcaaccactctcgacgaatatcagaagtatttcgagaaggataaagcattggaacgtcgtttccagattgtacaggtagatgaaccagatactctgagtaccatttccatccttcgtggattgaaagaacgctacgagaaccatcatcatgtacgtatcaaagacgatgccatcatagcagccgtagaactgagcagccgttacatcactgaccgtttcttgccggacaaagcaatcgacctgatggatgaagcagcagccaaactacgtatggaagtagattccgttccggaagaattggatgaaatctcacgtaagatcaaacagttagaaatcgaacgtgaagccattaagcgtgaaaatgataagccgaaactggaagttatcggcaaagaactggccgaactaaaagaagttgagaagtccttcaaagctaaatggcaaagtgaaaaaacgctgatggataaaatccagcaaaacaaagtggaaatagagaatctgaagttcgaggcagagaaagcagaacgtgaaggagactatggaaaagtcgccgaaatccgttacggaaagcttcaggctttggacaaagagatagaagatacgcaggagaaacttcgtggtatgcaaggtgataaagccatgatcaaagaagaagtggatgctgaagacatcgctgacgttgtttcacgctggacgggcatccctgtcagcaaaatgatgcaaagtgagaaagataaattattgcatttggaagacgaactccatcaacgagtgattggacaggacgaagcgattgaagcggttgcggatgccgtacgccgtagtcgtgccggattacaggatcccaaacgcccgatcggttcttttatcttcctcggaacgaccggtgtcggtaaaaccgaactggcaaaggcattggcggaattcctctttgacgatgaatcgatgatgacgcgcatagatatgagcgagtatcaagaaaagcatagtgtttctcgtctggtcggagcacctccgggatacgttggatacgatgaaggcggccagctgacagaagccattcgccggaaaccttactcagttgttttgttcgatgaaatcgaaaaagcgcatccggatgttttcaatatcctgttgcaagtactggatgacggacgactcactgacaacaaaggaagagtagtcaacttcaaaaacaccatcatcatcatgacttcaaatatgggaagttcttatatacaaagtcagatggagaaactgagcggttcgaataaggaagaagttatcgaagaaacgaagaaggaagtgatgaatatgctaaagaaaaccattcgtccggaattcctgaatcgtattgatgaaacaatcatgttcctgccgctgacggaaactgaaatcagacaaattgtactcttacaaatcaaaggtgtacaaaagatgcttgcagaaaacggagttgaactggaaatgacagatgctgctttgaatttcttatcccaggtaggatatgatcctgaatttggagcccgtccggtaaaaagagctatccagcgttatttactgaacgatctgtcgaaaaagttattgtctcaggaagtcgacagaagcaaagcaatcattgttgactcaaacggagacggattagtattcagaaactaaattatagttagttgttataaggacagccggtatgttcccaagtgagcatatcggcttttttatattcctgaatatataattcttcttacttccggctgacaattaggatggctcatgactaagacataagtaccttttctggatatctctaaagtgagcgaaggcaaggcaaatctatgcttctctttcagctccccctgcgaatcatataaaaataccattgtacctaccaacattcccgttaagcacaatgttcctttttcattatcaagataaacgtttacctctttatttgttattacatccatatttttgcgtatattagcagttacaaagatagagaaaaactatgtttatttactatataaacaataaaatattcatgcaaacataagattgcttaaagaacactaaaggggaccctttaattacgcagacatataaaaacacaaaaaagcgtgacaacttgtaacattatcacgctttccttattacatttatgcatctaagccatcaatgtttcatgacttatttttcatcagtcgcaacctcttcttcagcttccggctctgatttaaattctgtaattccattcgaaattaagatgttataccaggaaatcaatttcttaatatccgcgatgtatactctttcacgatcaaagttaggcaatacctcccctaaatactcgcgtaactgctccggagtggcttttttagggtcaatagaggcaactgcagtattttcttttttcttcatagcttccagcacatcatacaaaggtacttcagcatcatctgtatacattgctatatctgccaaagagataattttctcattaccataagcggggaaacgttttttatctgcactgattgattcaacaatcaacatattttttccttgcgaaattagtttgtacaatcccggtttaccggagatagacaggatagtcttcaacatagtatatattcttttatttattaattatttttttgcggagcaaaggtaatgattatttttagatagcaaagaaataaacttcaaaacctgcggaattaaaggggtttcatcgtcattcacgattacaaaatcagcatgattccgcttaacctcatcgctcatttgcgcttcgatacgtttcattatcaattcccttgaagaatggtcacgcctaattgcccgttccactctcacctccaacggtgcatataccattactacaaagtctacttcctgcttaaagcctgcttccagaaggatggcagattccataccgaccatagctatatcacctttccctttcacccatcgcctgaagtcttctttcacctgcggatgaatgacagcattcacttttttcgcatgttcggggcttccaaatatataagatgctaataaaggacgattcaattctccattcaggaaaacatcctgtccgaccaaggcgcaaagttcccggcgtatcacgtcattcgtatgagtgatacgcttcgcctcaatatcggaaatataaacggggattcccataatctccagcaatctggaaactacactttttccactaccgataccgccggtaatacctattttaatagccatcggaagaaacttgttctatcagaaaatcaacttgctcgggtacaatacggatttgattgattccacggggagccgacttcaacttcaccgtatatttatccgatcctaattttagcagttcctcataagaaacatttatcacaaaatcactggctttaatgctacgaaaacgctttaaacccacttgaaaagtaatttgaaccttcgatggaaaagcacggagcactttatctgccgggaagttaatcccacgtaacggcacctccacggttttctcagtataaatatcaacagggaaagtcagttcaaccgaagcgggaacaaacttcactccttttttattatccaaggcaacccgttgccgaatcgtatccgatatattttcaagatttacctcttgagtataagcggttgttatagtatccaaaattccggccggagcatataccaatacggaatccggactgcaaatggtatcagaaacataatattgaagccctgcagtcacttttccttgaaaatgaacgggtactaatttggacttgcctgtcgaatagatataatctaacgtatcaggttttattgaaagtatcttagaagaagcattcaattgactgagtatcttcttttcaaactcagaggcaaagattttcacgtgattattttgccctttatagtcagggaaactcagatttaccggaaagaaactcttccccaacatataattgagaagcactgttcctttatcttttacccggacgcgaagttcggaaggaggttccgaagtgagcacaatattattagggacatccttcatcctcaccgggatagagaattccgcttcatagtcattattaagagtctgaatcagccagaatccactggctatcaggaaaaaaaataaaaaaattaagaactccctgcttttatcactaagcaggaaatccttaattctcttggatagtcttaaatatgtatatcttaatttcctacgatcaagcatagggtatttgtttactaaagattatttagactgattgccggcagccgaagcatcagcaaaaatagaattcttatctattttaatcttcacgttagaagcgatttcaagtactatataatcatcagtaatctctttgattgtaccatggataccacctgcagtaattaccgactggtttacctgaagagatttacggaaattagcaatttctttctgcttcttattttgagggcgaatcataaagaaatacatgataacaaacatagctatcagcatgatccacatcatacttccacctcccgctgcgggagcttgcaataatacagtcaataagttcataaataatcaagttttagtttctactatatggacaaaggtatcagtttttagtcaacttaccttcttttttcaattgattaactattccatccagcgttccgttgataaagctaccgctcttggcagtgctatacaacttcgcaatttctacatattcatttaacgaaacacttaccggaatgttcgggaaacttaaaatttcggctaaagcagtctgcataatgataatatccataaatgcgatacgatccaaatcccagttcttcgtattctcgctcacaagatgacggtaatagtcagcattcagaattgtacgacggaacaagcggcgtgcaaattcctgatcttcgtcatccttgaattcgggaagtaattcctgatttgctccgttcttttcttcaaaacgcttaatcgttttcaagacaaaggtatctacaatctctttatcgtcattccaatacagactctggtcttccagcacctgatcaagagaatcattattaaagatatatgttttatagagttttctccacaattcgcggtcagcttcatatgaattgtcaccggaagccatataatctttataaatatcgctttctactattttctcataaagctctttgacgaaatcctgatcatttgcccaagttcgcttctgattggatataaactcggtcagttgcttgttcacctccagctgtgcaacaaacttattatccacaaactttgtgttgggatacaactcttctttagtaggagccagttttgcttttgccgcatcaatgcgtttttgtgcatactctgttaatgccatcatcagcattaacaaataattataaaggtcatacgcctttgaaaggctgaagaataactctttctccgctgagtctagatttttgctgccattttggtaataggcatacactatttgtataatcttaagacgaataagaactctgttgatcataattcaaattaatactgttattatcgaactgcaaaagtagatatttttaatgagtttccacaaataaatcacattttttaatgcagtatttgattctctgcgctttttcttttgacagtttaaaaaaaatatccaattttgaggccgattattaacggacccaatgatatggaagattttaaaaagaaaatgaacgcagacatgaatgataaggagatcgttttctccaagtccatcaaagcaggtaaacgcatctattacctcgatgtgaagaagaaccgtaaagatgaaatgtttttagctattacggagagtaagaaagtggtgatgggagaaggagatgactctcaggttagcttcgaaaagcataaaatcttcttatataaggaggattttcagaaatttatggcaggattgacagaagccatcagttttattaaccacagtgacatgaacgattacatcagccgcctgaacgaagaagctgatataaaaagagaacaggaagctcttgccgaagaagcacaagaggataagttggaaaacgaaattaagattgatattgacttttaaagaggtaactctttgatatttcaaaaaaaagctgtacttttgcaccgcttttttgcaacatcatgtgataatccacatcgtgtaatggtgaattaagcaaaataacttaatttagagtaacacatttttttaagaaatgaaatcaattgaagtaaaaggaactgcaagaactattgcagaacgctcttcggaacaagcaagagctttgaaagaaattcgtaagaacggtggtgtaccttgtgtactttacggagccggtgaagttgttcactttacagtgactaacgaaggtcttcgtaacttggtttatactccgcacatttacgtagtagatctggatatcgatggcaaaaaagtaaacgctatcttgaaagatattcaattccacccggtaaaagacaacattcttcatgttgacttctatcagattgacgaagctaaacctatcgttatggaagttccggtacagttggaaggtcttgcagaaggtgtgaaagccggtggtaagcttgcattgcagatgcgtaagatcaaagtgaaagctctgtacaatgtaattcctgaaaaactgattgttaacgtatctcacttgggattgggtaagactgttaaagttggcgaactgagcttcgaaggtcttgaactgatcagcgctaaggaagcagttgtatgtgctgttaagttgactcgtgcagcaagaggtgcagcagcagccgctggaaagtaatttgagattatccctgtaaagagatatagcaaaacgcagattaatgcagattaaagcagatgttcagtctgcattagtttgcgttaatctgcgtttctctttttatattcacgaactgtttttacgaaaaaacaatgattaaatatctaattgtcggactaggaaacattggacccgaatatcatgaaacccggcataatattggtttcatgacagtagaggcattggcaagaatcaacaatgctcctccctttattgacggacgctacggatttaccactagtttttcgatcaaaggacgccagttaatcctgctcaaaccgtcaactttcatgaacctgagcggactggccgttcgctactggatgcaaaaagaaaacatccctttggaaaatgtgttaatagtagtagacgatctggctctccccttcggcactctgcgtctgaaaggaaaaggaagtgatgccggacataatggtctgaagcacatagcagccattttaggaactcagaactatgcccgtttacgctttggtatcggaaatgacttccccaaaggcggacagattgattatgtactcggacactttactgacgaagatcgcaagacaatggatgaaagactggaaacagccggagaaatcattaaaagtttctgtctggcaggtattgatattaccatgaaccagttcaataagaaataggagtatgtacaattgactatttcacagcgtatatatgcaaacggtcattaagtactccaccatgacacatggtacactgttaattaataaattatcaatatatggcagaagcaagaatagataaatggatgtgggctgttcgtattttcaagacacgcacaattgccgccgaagcctgcaagatgaaccgtgtcactatcaacggagcatacgtaaaggcatctcgcatgataaagccgggtgatgtagttcaagttaagaagccgcctattacctattcattcaaagtgttgcaagctattgagaagcgagtaggcgcaaagcttgtacccgatgtaatggaaaacgttaccactcccgaccaatacgaactattggaaatgagtaaaatcagcggattcattgatcgcgcacggggaaccggacgtccaaccaaaaaagaccgcagaagtctggaggaattcacagctccggaatttatggatgattttgatttcgactttgatttcgacgaagataagtaaataatgaacggtgaataaacttatagcatgaagttacaagtttattcaccgtttattattttaccaactgttgattacagatttgctttcacagcatcaattagctcctgatattcagcatcggtcaaataaacttttcccggattcatctgaaatacaccgccataatcaggtccgtctacatatttcggagccagatggaaatgcaaatgagataatttatctgagtaagcaccatagttgatcttttccggctggaaagctttctgcattgcacgggtaacacgtgccacatcagccataaatgcattacggtcttcatcgctcaattcgttcaaatcatttacgtgatccttgtaagcaacgaggcaacgcccccgataagtttgctctttaaacaaaaacacacgtgatacactaagctgcgcaacctcaatcatcagattatgcaacgtttcattgttctggcaatacagacattcttttggatcactcttcatgatattcttatttttatgttttgacaaagcaaaaatagtcgttctgcttttatttcacctgtattttttcgtttttttgatcgactaattggtacacgttctctttttcaccaacaacccacactacatccccctcttcgaacggtgcatttacatccggcaccatcagagtgccatcttcccgttccacaccggctatcatacaatgatacttatcccgtatacccgattcacggattgttttacccagaaaaacggagtctgcatcaataatgaactgcttcaaagtcatctctcccttctcatacatctcccagtctatcttcgcaccactttgcatggcactgctaaatacattcaattgttcgtccgttcctattacctgtatcttgtccataggaaaaagacgcaccgagccaccgggaatattaatccttctcttcccccgcaagatagaagcgatatgaatgccatatttctttcccaaatttagttccatcaacgtttttcccgcccaagtggattcccccggaatctccaaatccgccaaatgcagatcatgagatagcagacgtccggcatattcgggtttcttctctcccaaatattctgcacgcacctctctggaacgcagattttgaaagaaacgccgttctatcaatatagattgctttttcaaacgacgcgaccataccatcaacaagactgcaagcacagccactccaataatcaatccaatagatgccttaaacaatcccgatatcacaaaaatgacaaataacgccgcaatcataatacgtatgacaatagtagacaccaatggtgcacgattggcacggttatcatgccacagggtcataaattccaccgaatggtttttcttcaccatgatagcacgcaggaaaggcgaaatgcaaaggataataaaaacagcccccaataatgacgcccagaaatgaggcaggttctccttaaagaatgggacgacaaaacggaaagacagtgcaataatggatatactgacaattgaatataccacagttatgcgtaccattgccagcaacagcttcttccacaaattctcatgattaagtactgtttgcgagcccgaagaataacgcattaagaactttctccaggaagcgggtaaatgagcatccacaaaagaagaagccggttcagccagacgaatcatataaggagtcaggaaagtggttatcacagaaactgctaccactatcggatataagaaatcgctcgtcacgtgcagagatacacccaatgaagctataataaatgcgaattcaccaatctgagtcaaactgaaaccgcactgcatagccgtcttcaagggtttgccggaaagaatcacgccgaatgttccgaaggtagcctgccccaaaataactgcgatcgtaattacaatgataggtattgcatattcaataatcattgcaggatcgaccatcatccccaccgatacaaagaaaattgcgccaaaaagatctttcaccggcttcaccaaccggtcaatagattccgcttcgattgtttctgccagaatagaccccatgataaacgcaccgaatgcagcagagaaccctgtattggctgccatcactaccataccgaaacacagtgccaatgatacgataagcagagtttcctctcccatcagtttcctgcaacgcttcaaaaactccggaatcagatagatgcctactacaaaccacaaaataagaaagaacagcagtttaccaatactctccagcatctcggtgccttcaaagttatggcttaccgccatcgtagaaagcatcaccatcaatacaatagccagtatatcctccagaatcagaatactcagtacaagcccggtgaactgcttcttcctcagtcccaagtcatcgaacgccttataaataatagtagtagaagacatcgcaatcataccacctagaaacaggctgtccatccgatgccagccgaatcccataccgacacctatccccagcaatatcatacaaaagatgatggtgcaggcagcgatgatagcagaacctccgacttttacgattttcttaaaactgaactccagaccaagagcaaacaacaagaagataacgccaatatccgcccatgtcttaatgttggcggtatccattactgatggtgtataaggcatgtgcggacttgccagaaaaccggcaaccacatatcccaacaccaaaggttgctttaacttcttaaacaacaaagtcatgacgccggcacagatcaatatcagcgcaagatcggcaatgagtgtaggtaattgagacattgtttcatcgtatttggtgacaaaattaaaataaatctatcgtataaacaacagattcacggatatgtttcacatcaaccatcataaaatgatttagccccggatagtatcaaaacctatccggggctaaaaattctataaactcaagatttattttctaaaaggtggcttcaccactattgccttcaatttacgtccacgcatatcaatacagatttccgtgccaactttggcatattccggtttcacatatcccataccaataccaatcttgcgagtgggagacattgttccggaagtcaccacgcctataccttccccttccccattcacgagttcatagccgtgacgaggaatgccgcggtcaatcatttcaaaaccaaccagtttacgggtagttccttctgccttctgcttttccagcatcggacggttaatgaactccttaccttccacaaacttagtgatccatcccaatccagcttcgatcggtgaagtcttatcatccagatcattgccataaaggcaaaatcccatttccagacgaagcgtatcacgggcacccagccctaccggcttgataccgaattcttcccccgcctcaaatacagctttccataccgcctcggcagcatccggatagaaataaagttcaaaacctccggcaccggtgtatccggtattggagataatcacattctcttttcccgcaaaccggccaacggtaaatgtataataaggaatagccgacagatcgatatccgtcaacttctgcaaagcaagaatagccttcggaccctgaacagcaagctgcgccatattatcggaagaattctccagttccgccccctccgtattatgagaaacacaccagtcccaatccttttctatattggccgcattcactaccagcagatatttttccggctcatagcaatataccagcaagtcatctacaattcccccttcttcattagggaagcaggtatattgtatcttaccgggaacaagtgccgccacattattggaagtcaccttctgaagaaaggctaacgcttgcggccctttcacccagaattctcccatatgggatacatcaaataccccgactgcattacaaacagtcagatgttcatcaataattccagagtactcgataggcatattatagcctgcaaattcgtgcattttagcacctaatgcaatgtgtttctctgtaaacggagtggttttcattttttgtgtattaagttttaagtaataaattgatattcgtggaatgtaatcacttagaagctactagttcggcaatcttcacaatgacgttcattgccttctccatattctgaataggaacaaactcataacgtccgtggaaattaagaccgccggcaaaaatattcgggcagggtaaacctttgaatgatagctgcgctccatccgtaccgccacgaatcggcttcacattcggcttcactcctaccgcctccatggctgcaaaagctgtgtcgatgatatgcatcaccggttctattttctcacgcatattatagtattggtcacgtaactctagtgtcgccgtaccttctccatattcggtgttgatctccgcaaccagacgttttatttcttccttgcgtttctcaaacttggcacggtcatggtcgcgaatgatataagacactgtactttgctccacatctccctgaatactgatcagatgatagaatccttcatacccttcagtctgctccggtgtttccatcgatggcaacattgcgataaactgattagcgacacgaatcgagtttatcatcttattctttgcatatccggggtgtacattacgtcctttaaaagtaatctttgcagcggcagcattgaaattttcaaactccagttcccctacttcaccaccatccatcgtatacgcccattcgcagccaaacttcccgacatcgaacttatgcgcaccttcaccgatttcctcatccggattgaaaccgatacgaatctttccatgtttgatttcgggatgttctttcagataaacgattgctgatacgatctcggcaattcccgctttatcatccgcaccaagcagcgtcttgccgtttgttacaatcaaatcctctcctttatgatcgagcagttccggaaattgtgcaggagaaagaatgatattttcttcggcacaaagcactatatccgtcccatcgtagccttttacaatacgtggagttacatcttttcctgtcatatcgggacttgtatccatatgagcgataaacccgatagtgggtacttttttatctatattagcaggaagcgtggcaaaaagatagccatgttcatccaaagtaatatcttccaaccccaaagattccagttcagtcttcagatattcagcgaataccatctgtttcggagtactgggagtaagccctgttgattcatccgactgtgtatcaaagctcacatacttcaaaaatctgtctactaaagtcatatctattttacgatttaatgatttgcaatttacattttgatagtttatagtgccgtaaaggtaaaaaaagagccgtgaattgacaaacaattcacggctcttttttctcagtatattacttaaaagtgactgctaccatcaaaacaatgcgtacacactttacatttcggcagcccgatagcttcaatcaaagtctcaagcgtgttgaatttcaatgaagtcagtccgaaacgctcggctatgatactaaccattttctcgtattcgggagaccccgtagtggcgtatttctccagattcttattctcatcgccttccagttctttaataatacgacgagtaatcaactccaaagcattcttagaagccgagaaacccacaaacggacaggcatagatcaacggagggcaagcgatacgcatatgtacctctttcgctccataatcatatagaatcttcacattatcacgcaactgtgttccacgcacaatcgaatcatcacaaaacagcagacgctttccctgaagcatggcacgattcggaattagcttcatctttgcaaccagcgaacgcatttcctgattgctgggtgtgaagctacgaggccatgtcggtgtatattttgaaatggcacgatgataaggaactcctttaccttccgcataacccaacgccatacctactcccgaatcagggataccacaggcacaatccacttccgattcgtccttctgtcccatcttcattccactggtgaaacggacttcctctacatttttgccctcataacaagaggtcgggaaaccataatacacccaaaggaaagaacaaatctgcattccttcattcggttggcgaagctgctcgatatgatcgggatacatgcgtactatttcccccggtcccagatacttttcgatttcataatccagattcgggaaactggatgactcgctggtagcggcatacgcaccatctttcttgccgatcaccaccggagtacgtccccattggtcacgagccgcgataatactgccatcctctgtcagaatcagcagagaacaagaacccttgatatgtttgaatacgttctcgataccttcggtgaaggttcttccttgtatgataagcagtgcgatgagttccgtttgattggtgttgctcgaactaagttcggcgaagtgcatattttggttgagaaggtcttcttccagttcctggatattcgatattttagcgactgtgacgatggcgaagcggccgaggtgggaattgatgataatgggttgtgcatctgtgtcgctgataatgcctatgccggcattgcctttaaatttatcaagctctccttcaaacttggatcggaaatatgtactttccagattgtgaatggagcgaataaatcctttctcctgactataagtcgcgagtccgccccgctttgtacccagatgtgagttataatctgtaccatagaataaatcagtcacgcaactcgatttcgagactgttccgaaaaaacctcccatgttgttctctttattgataatgtttaaaaaaagatggcgcaaaagtacaaaaaagaatccatccgataaaaaaagcactccgcaaagttttaattttctttgcggagtacttctaaattttattaaaaatacaaagaagattgaacaatcgttttagtcgcgtctcatttccatttcttaattgatttccggtcggatggagctgcttcgataagactcaatgcaaaaccaccgctgcgtgccagcttgacggacatctttgttttattcgtaacgatccctttctttatctgataggaagtcggattcttttcgtagtcagcctcttttccgtcggcatacagggtagccacatactctttatccggttccagaaaatcaagagtaaacgcggcagtacgggagttttcgtcagtaataccgccaacaaaccaatgattggttccttttgctttgcgggctactgtaatataatcccccggttcggcttccagatatttgctgtcatcccagtccaaggctacatctttaataaactggaaagcatccggataacgctcataactttccggcaaatcggcagccatctgcaaaggactgtacattgttacgtaaagagccagttgtttcgccagagtagtacgtacaacgctatgcttcccatccagaaaagaaattctcgtgtcgaagatacccggtgtataatccatcgggccgccgatctgccgagtgaatggaagcaaagtagtatgaaaaggtttattaccggcaaaagcttcatattccgtcccccgtgccgattcattgccgatcaggttgggataagtacggcataatccagtaggacgtacagcttcgtgcgcattcacacagattttataatcggcggctttcgtcacggcatatagataatggttgttcatccattgtccatagtgatgttcgccccgaggaatgatattgccaacataaccacttttcacggcattatatccgttgtcaaccataaattggtaggccgtatccagatggcgttcgtagttacgcacggaggcagatgtttcatgatgcatcatcagcttcacccctttctctttggcatatgcgtttagcatcttcacgtcgaaatccggatagggagtgacgaaatcaaacacataatcttttgatttgccgaaccaatcttcccagccttcattccagccttctaccaatacctgatcgaaaccatgctgcgctgcaaagtcgatataacgttttactttgtcattgttggcagcgtgacgtccgttagggcttgtctttgagtaatccgtctgtccgagtttgacggaataaacatcatctgtatatgcccaactgctttttccggtaatcatctcccaccacacaccgatatacttcaccggtttaatccaagaaacatcttgataagcacatggttcgttcagattcaaggtcagtttggaagcaaggatatcgcgtgcatcatcgctcacaatcaccgtacgccacggagactgacagggtgtctgcatataacctttatctcccattgcatccggtgtcagccatgattcaaaaatcagttttttgtcatcaagattgagatgcatgcaggaataatctaccaaagcggcttcgtgcaggttaatatacagaccgtcggctgttttcatttgcagagatgtctgcacgcctgttggtgaaaaagacgtttgagaagcattgtcggtaatagcccctttcatcagtccacggatttctgttagtctggattctgtgtaatcatattcctgggtatcataatctcccggaatccaaaaggcagtatggtcacccgtcatggcaaactgcgaatgttcttccttaataacaaaataattcagattcttctgctgcggaaattcatagcggaaacctaatccatcattgtaaagccggaaacggatgatcatattccggtcctgcgccttctgattcagtgtgacagccatttcattataatgattgcgaatggatttcacttctccccacaccggctcccaagtttcgtcgaaggtggaagtttttgtatcgatgcacgcaaacccattcatcagtcccggatcattcttcaactcaagtcccaactttgatggtttaatcactccctttcctttataagtaagttcgtataccggttctccctgaacattgaccgaaaaatccagttttaattgtccgtcaggagaagtgatactttctgccattgccgttgcacccatagaaaaagagagtaacagacagagtactgccgtagttaatattttcatgttcttcatgatataaatgaattagttaataatcatatggcaaatgtagtgaggaatagcaagcgccacttcggattataattaaaatatagcgtttccgaatgtttcaacactgataaatacctatcaataaagcatataccaaagtacttcaacagaaaaaatatagtgcttacatggagcaatatagcaccttttcacatccgacaaacgggatttttctttatttccccgcctctcttcagaaataaaaaaaatattttaatctcatactctcatcctatgacaactaatatatagacaatcagcacaatacagaatgagagatactttttaaatagttatctctcatcatttcctcatcaaatagctttctttttgactacctctcattcatatttcagttatctctcattcgtctcaaagccgataatccattgtactatggcaagccttacagaacatggaacctaccgctactttgtatataacatatagtatgtgggtatgtatatcatctattaatactgtatttttgaagggatattaccatcgttccactccagtgcacagatctcatcactcttgtgaagagttctcatcactagagtgaacagacctgttcactctagtggaacgataaagatgaaaggtagaaaagatacaaatataagcaggatatgtacttccctaataatggttgacttgtttatctctaatagctgctatgtgttgactagaaatattactaaccctggcagctgtttactttattatttattattcctgcctccggtttacttatttttttcttattcctttaaccggttgactcttctctttgaaagaagaaaaaagaaaggaactcaccctttttcctctttctatcccgctagcagggcattcttggtcttttcataagcaaatgtacatatttatttttaagcaagtgctacattcagatacttttctctgtagcttatccatcttttcctgataggtccttgcatttctcctgcctgtaccggggtaagcatatccaagctcatatgaggcctttcgttgttatagaagtgaacggctgttgctacagcttttctgacttcctgtattgaactaaagcgcattccttgcagcaattcattctttataatgccattcacacgctcagctatggcattgtccttgggattgccatcctctgtcatgctgggaagaatcccgttatgtcgtaatatggcaatataatccgcactggcatattgtacgcctcggtcggagtgatggatcaaacccttaatctcctttgcagctatgcgtctgactgccatttccagagcttccactgtgtaacagcttcccagagtatcacctacgcaatacccaatgatctccttcgtataggcgtctgtcaccagagacaggtagcagaacacataactgccgtcaggcaaccatatggtaatgtaagtgatatcactaacccacagctgatcaggatgttctaatagcaatgtcctggttaaatcaggatactgtggcaagtgatgagaggagtctgtcgtacgtggagcccgaaaacgtttgcgtattgtcagcttatacttggacaatatagcacagaaacagtcacgcccaacaaaggcctggctggtgccgaactcattacggtacatcagccaaagtttcatccccccaataccagggtcctttgaacgcacacgtttgacaaactcaagaacaaaacgttcacgggccgaactatccgtactatggtcaacatacttataaaaggcttgctttgttacaccaaacaatttgcaaagagagaccaccgtataggcatgcctccctttacaaagcctttttattgtttggtaccagctttttttcggataggaagattaaacatctcctcggcaacatcaatcatcgtatcgaaggcgtgcgcacgcattttagcatctttaagctctgcacgtaaacgctcattctcaagacgtaaggcagtaattgaggaggattcctccgaggacttgggagacttgtgctttttcatataagcggatatttcaggattagaatcctcaaagatacgaacccaacgccaaaatgtaatacgggcaatccctttttcttgggcaaaacgagaaactgagaaattcgaacgatagaaatcgccaagaagttcaagctgataaggactaaaggtcatgtcactctttttcatcttttattcattttagttgatacttatagtagtcaaccaaatccagggtaagacaatatcatagaaaagacagtcagataaaacactaacaaccgcccaatgacaaggaatacaatatagttcaaaatacaatatccgcatgggttcggattgaattatcctaaaatttacatctaatctgaataccagagacaaaaaagttcaaagtatgctatgatattagcatataattgataaatttgcaagcaaaatatcttactttataacacataatctaatattactattatgacacagcacttcagatatacgacattggtacttcttacaacattatctaccgtttatgcctccgcacagtctctgcgaaaattaatggaaatgcctccgcgcattattgaatcgaaatgggagcaaactccggaaggaggaacagaattaaactattacaacggagacctgtgcagttactaccttttccgcgaaaatgatcgttcatacaatttgaaccccggaaagaacacggtattcagaatagagaaaggctccaatgccagcaattctttcaagacttcaagcaggtatatgttcttccgcggtcaattccccaaagactttcagatcagtactccttatgcacttcctgtaaagaccggcgaagaaacacaatggcagatcgctcctcaggaatctgccaaaactatgatattccaaattcaggaaggagacaccgtctatgcaacccgcagaggagtcgcctgtgcgacagtgctgccacagcaattgttgatataccaccccgaccatacctttgccgcttaccttatgatgcgtcaaaacttcatccagacgggtgaagaagtcatgaccgggcaacccattgggatagccggagtactcggagtatccatctcttatttttttcttgataacaataaattcgatgcaaacggcttcttaggttatccatattctcactttactcctgtattccgcacggacaagggggatgtaaaactggaggagaaaacagcctataaatctgccacagatgatgaactgattatgctcgaaatgagcaaacgtgaaaaaaagaaatttcagaagcagaaatactcaaaataaagggaaacaatatgcgtatattttatcttatcctctgtttcatctgcctttgcgacctgctccatgcgcagactgtaagaatctcttatgaaggcgacccgcttacggacaaagaacgccggaagattgaacagaccctccaatatgaagtcgaattttatgcacaattcggacttcccgatacgcttaatcttcaattgactgtattcaacaaaagggaagatgcgctggtctatctgaacaaattcaatatacatcctcccaaaagtacaaacggaatgtatatatccagattacaaaaggccatcatattaagcagagaaaaagaataccaacaaggtctgggcgtcatctatcacgaactgagccatcacctcaccttgcaaatcacggcaggacgtcctccgatatggttcaacgagggacttgccgaatattttgagcattgtaaagttaataaaaaaggacttcagcacacgtttaccgattacgaaaaaggaagaatccgcactatatatatgttgggggacattgatctgctcacctttatcaacagccgccaaaaggaatttatgaagcagcaaagaaccgacgaacaatacgcctatatcctctctcatgcactcgtcactttctggatcgagaaagttccccggcagatattacgtgattttgtactctcctttcaaaacaaagatgactcatccattgtttccgaacggatagataaggtttacaccggagggttcaaacaatttgaaaaagattttgaagccttctgcaaatagttttatcttttttctatctttgcaccggctatgggattagcctttaaccgcccttcggagctgatgatccctacaatttgaatgtataactcttaaattgtcagcttatgctcaagactttactctttatcggtatgggaagttttaccggaggcgttctgcgttatctcatctcgcgttacgttcagaatttcttgacaccttccttccctttgggaacacttctggtcaatgtactcggttgtttcgccatcggcctgttttacggactcttcgaacggggaaatctgatgaaccccaatctgagaatgtttctcaccgtaggattctgtggaggattcaccaccttttcaaccttcatgaatgagaactttcagttaatcaaagacgataatttcttctacctctcactctatgtaggcctcagcttgtttgtaggattcattatgctgtacttgggatattcacttgtaaaacaataaacataacatatctaccctcaaatccgcaactacgcgcctaatatgatacagaagcgaaaagaatctgcatcgttagtaaaaagggggcacagtgcatcgaatgtcaccataaagacatataaatgccccttaccccaccatgcgacttgaggcaatacgcaaaatcacgactataagttgtcggtgttatccaaagtcattctggaacacattggcataagcattgttgcatgaatagatattcagcacatacttccttgatgtcctgacccatttggctggcacagagatgaacttaaagacaaacgtcttgatgcggcttgttgctttgagtccgaacctcttcacgtcaagcctcgccatgatgaatttatagaagttgcgtatgagtgccataagcagaagaaacaccgtgttttctcccataaaggattttggaagcctgttccagccgaatccgttattcatatcatcgaagatgcgttccttccctccacggaggttatagaattcgacaatctctttctcggaagactcgtagtcatttgtaaggatgcagcggtaggtgtattctccttcccacaggtcgagttcgccgtctatccgcttctgtctttgaatcacaagacggtatgccttccctttccatttctcgatgagaatggaggccagctcaaactcaatgccattgatttcctcagttttccagcctttgagagcaaaggtgtcattgtagatcgaactgcagcggttagcacggatatagaaggacttgcagtgtttagcaatctcttccactatctcttcagaacacgagccgcaatcagctctgaaacggttgataataagcttgttttgttcaaacctttcaaagaacctcttcagcgtgtccttctggtggaaacggacatttgtgttgccgtcgctgttctcaatgccgacaatcaagttgccaataaccgccacgccagggcgataaccaaggaacttcttgtatgtaggcttcgcatcaaacttctcagcctctatgaactggtggtcgaagtcaacgtcatacccctcgccctctttcagctgccctgtggacaataggcaattgaggagcagtgtattcagcttgtctgccgtgttgaagtcgtaggtcttgccagtgtcggatgtgtaggaaatgttatcctgggtcagttcctttatggctctaagaatcgtgtcggcactgcatgtgcgaagtgtcggatgaagcgaaaggtggtacatcagatgagtggtgacatcctcgatgcatgagccgccacaaaaataaacgctcataagcgaacggatgatttcgctgtattgataaccatacagcctgcatctcataccgagggttgagtcgattacagatgagagtctggagtcaaattgctccattattgaaaatattcctccaaaaggagtgagtttctcggatttaattgctacctttgccatgtctgtcgggtttgatacatattttgatttgcaacactaagataggtgaaaaatctgacatggcaaattcctgagcaactttttgttgctcaggtacttaaaaagttatatttgtaatagtgttgcggaattaaggtctacatcatatgatcaaaagaaatgcagccaagcccgtccgtgtggctcctcccatgatggaggaacaggaagtcagtacaagcaccttgcaagaactgctcgaaaaagaggaaaccgtctcaaatctcatattcagcaaaggaagagaagagggaatcagcaagtcttacaagagtttcaagaactgcactttccggaatcagacattcagcgaatgtaaattccgttcttctcagctggcagatatacggtttgagaactgcgacctgtccaatatatcttttgcagaaagctccctttaccgggtagagttcattgcctgcaaattactaggaaccaacctttcagagacgaccatgaatcatgttttattgcatgactgtaatgcctcttacatcaatctggcgatgagcaaaatgaatcaggtacgcttctcgcactgccatttccggaacggaagtttcaatgactgccgtttctcttccgtcgccttcgacagttgtgatttggtagaagctgacttttctcatgctccgctccgtggaatcgacctgcgtacttcgcgcatcggcggaataacacttaatatcagcgacctgaaaggagctgtcattacttccttgcaggccatggacttgcttccgctgttgggagttattatcgaagactagaattctaccaatttcatccatccgcattcaaacaaaaagcatcgtcacattgttatttaataagaccggactaatgacatctagggagtatgattcgaaagaatacctatttatagtgatttcccactctctgtcaagtccgtacttttgcaaaaatattattcaaaacaatagaaacgatgaaaatagaaaaaattgtagctcgagaaattctcgattcaagaggtaaccccacagtagaagttgacgtagtattggaatcaggtatcatgggacgtgcgtctgttccgtcaggtgcttccacaggtgaacatgaagcactcgaacttcgtgatggtgacaagcaacgttacggtggcaaaggcgtacaaaaggcggtggacaatgtaaacaagatcattgctccgaaactgatcggtatgtcttctctcaaccaaagaggaatcgactacgcaatgttggcactcgacggtactaaaaccaagtccaatctaggtgctaacgctattcttggcgtatctctcgctgtagccaaagcagcagccagctatcttgatctccctctctatcgctatatcggcggaacaaatacatacgtaatgcctgtaccgatgatgaatatcatcaatggcggttcacacagtgacgctcctatcgcattccaggaattcatgattcgtccggtaggtgcaccctcattcagagaaggtttgagaatgggcgccgaagtattccacgctttgaagaaagtactgaaagatcgtggcctcagcactgccgtaggcgacgaaggtggtttcgctcctaacctcgaaggtacggaagatgctctgaactctatcatcgcagccatcaaagctgccggatacgaaccaggtaaagacgtaatgatcggtatggactgcgcttcttccgaattctaccatgacggtatctacgactataccaagtttgaaggtgccaaaggcaagaaacgtaccgccgaagaacagatcgactacctggaagaactgatcaacaaattcccaatcgactccatcgaagacggtatgagcgaaaacgactgggaaggctggaagaaactgactgaacgtatcggcgaccgctgccagttggtaggtgatgacctgttcgttacgaacgttgacttcctcgcaatgggtatcgagaagggatgtgcaaactctatcctgatcaaagtaaaccaaatcggttcgctgaccgaaactctgaacgctatcgaaatggctcaccgtcatggctatacgactgtcacttcccaccgctccggcgaaacggaagacgcaacgattgcagacatcgcagtagctacgaatagcggacagatcaagaccggttcattaagccgttcggaccgtatggctaaatataaccaactgctccgcatcgaagaagaactcggtgacttggctgtatacggatataagagaatcaaataatctttattctcttttcagatatctttcccccgggcaatgtgttgtccggggatttttttatatatttgatgacttacaaacgacctgaagcattttgctacgtatcatatagtaaacaggaataaataatgatgaatcaggaaaaaatacaggaactggtcagccgaagtcagcaggacgacaaaagggccttcgccctactggtttcagaattccagccactggtattccgactagctttccgtttactttgtgatgaagaggaagccagagacataacacaagaaacatttgtaaaagtatggttatccctgaaaacgtacaatcaggaaaaccgcctgtcaacctggctttacaaaatcacctgtaacacctgttacgaccgtttgcgttcgttacgccattctccgctggataatgaatccgccttttccgattcggtaaatattccttctgacgatcatattgagatatctctttccaacaagcagttgaaagaactgatattgcgatataccaacgaactgcctccccagcagaaactcgttttcacgcttcgggatgtcgaagagttggaggtagcagaagtacagattatcacaggattatcgcccgaaaagataaaaagtaccttgtaccttgccagaaagaacatacgtaataaaatgaatcaaatagatcccgacttatgaaacaagaagataaacagtatgaaaaatggctgaccgaagtcaaaagtaaccagccgatattggaaaatccggaggaactgaccgctaccatcctcaacagaatatccgggatctcaccggaaaggaaacggagaaagtttctcataggagcatgggcatccggcattgccgcctcattattactcctgctattcatcaatgacacttgcttcacttctgtccctcaccggacagaaatgcaaaatgaatatgataactggtcaaacagcattccattacctgacaactgggaagaaatgcgactgctggaaaagaacacttatctatcctctcaatatacgcaacaccggaaatcccggaagatgcaaatcttacaagtcatcaaaaaaaaacgattaaaatagacagaatatgaaaaccaactatttcttaataaccatgctactgttacttagcatgacttcttgcagcacctattatcggatgacttcacgggttgaaagggacggaagtatgtacagagaaatctatgcacaaggtgattccgctttcatcgcaggagataagacacataatccatttctgtttcaaccgaatgccaactggcaattagtaaatctagactctacaattaaattcaacttctggggcgaagaagaaaagctgaatgtaaaagcctgccaaaaactctccggagtagatggagaatacttcactgttgacaaaggtaaagagcatctgagtgccatggctatacctatggaacgggtaaagaagagtttcagatggttctatacctattatatatataccgccacttacaaagaacttcaggacaaaggtcctgtacctcttgacaattatctgaataaggaagagcaaatgatttggcttcatggaaacgatgatgccttcagaggcatgaacggcatcgaaatgaatgataaactggataaactcgaagctaaattcggagaatggtataaccgcaatgtctatgagatcaattgggaagtcatccgccacttcacttctttacaaggagataccgcttgcctgcagtgtctggaggaattgaaagattctgtctacaagaaacattcgtcagaaaaaggcgacagtatgggagacgctgatatcgaggaggtctgcggtatgtttgataaagcttgcagtacgaaatacttttcggacctttataaaacaaataaagaaatgatggatgccctgtgcgaagagaaaatcaacatcgccgaagtcttctatcatgctatacaatttgagttgacactgccgggcagactgctcacctctaacgccaaagttctgaaagataatgtagtcatttggaaaatagacggcttccggcttctcgctggtgattatatacttaccgcagagtcacgggtcattaattactgggcattcgggattactttattcatgatgctgtttgtcttaggaattttcatcaaattatacaggaggagatcataaaagcagtaacaaatagcatcgtcgttttcagactcttgcagcagtcctcaaccggatgattgataatcatactgtatagcagataagccttttcgtttcatcaagtaaatcattccattcatcagattaatttgagtacgcgaaaccatcagggtaattttgaggtcagaaatcaattaaactatttaaatgatgaagactcttaaaatctatttcctgcttatgctgctgattcagacaatcagcatatccgcacagtcagtcatatcgggtaaaataaccaataacgacagttcacccatagtcggcgcgacaatattgttatcaaacggtatggactctacctatataacagggacgacctccgacttggacggacgatttaaaatgataaatgtcaaatcgggcaattactttctttccttgtcaatgatcggatataagaaagcaaatatccccctgcagatcaaggaaagcatgaatctggaattgggtgacattacactggaagaagattcttatatattgtctactgtaaatataatcggcaagcgccctccaatcaaggccgaaccgggaaagatgacagtcaacttatcatctgccctattgagtacggacggtaatatactggatgcactgagaaaactaccgggagtaatcgttcagaatgacggaacaattattcttaatggcaaatcaggggcgaatgttttaatggatgataaagtgacctatttatcgggagagaacctcatcaattacctgcgctccatccctgccagttctattgaaaatatagaactgatatcccagccatcatcaaaacacgatgcttcaggcagttcgggcatcattaacattcaaaaaaagaaaatcaaagaacaaggtataagccttacagcttcctccggtctggaacaaggaaaacatactaaagggaatgaaaacctgactctgaactttcaccacaataaattgaatatgtatgccgactattcttattattggggaaaagattttatagaactatcggtttccggtcattacctggatccgatgactttaaaacctcttgaactgagaaaagattttgatagtgatataaaccggcaatacaaagggcattatatcaaaacaggggtcgattatgacttgtcggagaagatagccatcggaacatacttctcatcaagctggctcaataggaacaaacaagaagtgactgtatctgacttttttaataacgacaagactcaaagcgactcaaccttaacagcgttaagcacaccggactatagctacaccaatatcatagggggagcgaacatgatatacaaatttgcgaaaacaggaaaatgggatgcttcttttgattatcagctttttaatcaagaggataaccatctgctgaaatccttttttcagacaggtattcatccggtaaaaggagacacattgtccggtataaccaatggggacattaaaatatacagcggacaaactaatttgagctatgatatctctgacaagttcggaataaccaccgggctcaaatcggttttcgtacatataagcagtgatgccttatacaaaaacctgattgccggtgattggagagaagacagtgatctcagcagtagttttgcttatcatgagaatatctacgcagggtatcttcagctaaacgctaaatggtctgccagattttcaacagaaataggcttacgattagaaagtacatatacaaaaagcaattataattcagccgttcaggactcggtattcaaccaaagctatgtacacctcttccctactttgatggttcaatatcagctttccgaaaatcataatttgtctatggcatacagccgtcgcatcgtccgccccaattacagaaatatgaatcctttcgttgaggtcagagaccagtttttatatgaacaaggaaataccgaattaagaccagaactaatagataatatagaaatctcatggctactcaaaaaacgatattcattcaatgtattctactctcacaggagtgatcctatctcgttaagttttttagtcgaagataataaccgtgtcttactaatgccgcaaaatttatcaggcaataactcattcggagtaagagccggcttgaataacctaaaaccattccaatggtggacatcccatataaacggatctttaacttataagaaattcagttgggcaacacttgggaaaacactaaaaaatgaagtgacaacacccatgctacatatcagcaatcaatttacattaccatacggctgggatgcggaagccctcggattttatagtggagaaatgattgaaggacagaccagagtgaaacctttatggacaatatctctcggagtccgcaaaaacctgtgcaataacaaatttagtttgtatatttacgcacatgatatatttcattcgaaccgcccccatgtaagtatggagactaactatctgtattacgcgtctcaggaaaaaaacgacagcagaatgataggcatatcgctcagttatcgtttcaatcgaggcaaagagattaagaaatctcagaatgaaaacagaatagaagaaagtaaacggataggtttgtagtatcaaagattaaaatagcaactaatgaacttaaagtacgaatggattaacaccctatttataatactgccactttccttgtgcgtatttattattgtagatatcgcttataatgagcgaatatgggaactggatacttttgccgtaaaagcacgtttacaggcattgggcatcactgttgcttacttctatcttttaaactatatttttaagcgggtagcccgcttctttatcgacaaaagcaaagatgagaagaaagcaaactggaaagaatacgtatgggtgtttctgataaacttcgtcttcctaaatatcatgcatacattcattatgttttgcataacgatggccgggactttcaaatggggcgaatcggcattgatcaatgtgacaggagctctcctggcgtttctatattatataatgatacgcaatagaattttattcaagagtcttatcgagcaaagccttcaattagaaaaagtaaaagtcgaccaactggagaccgaacttaaatttctgaaatcccaatatcatccgcatttcctgttcaatgctttaaataccatctattttcaagtggatgagaataacaaagtagccaaacaaagtatcgagcagctctccgacctgttgcgatatcagctttatgatatagaaaaggaagtgacgatggaacaggaaataaattacctgagatcatatattgcctttcagcaattgcggatgagcgaaaggcttatgttggatttatatttcgacccgcaactaaaagagcaaaaaatacatcctttattacttcagccactgatcgagaatgctttcaaatacgtaagaggagattacaaaataaaactggaaatcaaagttgacggaaaccagattcagtctgagataaaaaattcaatatcctcctccccatctactgccaacaaaaaagagaaagggataggcattgagaatttaaaacgccggcttgaccttctgtatcctgaaaaatacagtttagacttcaaacaaacagaccatatgtttatcgctaaattaaccataaacactgattgatatgaaaataaaatgtatcattacagatgatgaacctatagcaagaaaaggcttgcgagggtatatcgaaaaagtagatttcctcaccttgaccggagagtgtgaagatgccgtccaactaaatacaatactgaagacccaagaaatagaccttctgtttcttgatatcgaaatgcccgaaatgacaggtatagaactgttgtctaatctaacaaatccgcccaaagttattattgtatcagcttatgaacaatacgccctaaaaggatatgagtttaatgtagtggattatcttttaaaacctgtatctttcgatcgttttatcaaatctgtcaacaaaatctacgatttgttacaaacggagcaaaaagaaaagaatgattatatatttgtgaagagcaacaaactattaaaaaagattctgttcaaggatattctctacattgaaagcatggaaaactatgttgtcattcagacagtctcatgcaaggaagtagtgtatactactctgaaacaactcaatgattcattgccgaaggatgtttttcaacagactcaccgctcatatattgtgaatcttgaaaaggttactgctattgacggcaatcagctgaccctctcctcttacaaaataccagtagcccggaccttcagagacagtatcttcaacctgatactgaataaccggctaataatcaaaagctaaaccggagcgacacaggatataaaagaaaaagcatccaagtaaaatacctgaatgcttttttctttctgagcctcttgtcggattcgaaccaacgaccccgagattacaaatcacgtgctctggccaactgagctaaagaggcgggtgggtaagcttactatatcgcgccgctacaaccaactacctttgctgcgatcaagccctggaggattcgaagggagctggccgtataggacttacccgttttgcggttgcaaaggtaggcatttttatggattctgcaatagctgtaggtaacttttttgcataaaaggaagtaatactctacgtttcaagcaattaaaaatcaaaaaaaatattcgagtgccaacttttactgctttattaactttaacaaccatattccctttaccaaccgatattatttgtacctttgtgcgcaatttattaacgaagatgacagagaacagaagctatttacagaaatatgccatgcactttggcacgtatatgggaatctattggatattgaagttcattttatttccgttgggatttcacatccctttcctttcactattatttgtaatcctgacgttggcagtgccgttcattggttatcactacgtgaagatgtatcgtgacaaaatatgtggaggaagtatccaattctctcatgcggttctctttaccatattcatgtatatgtttgcttccctgctggtagccgttgcacactacgcctatttccagttcattgaccacggctttatcatcaactcctatatccagttatgggacgaactgatgactaaaacacccgctttgatggaaaatcaagagataataaaagaaacgatagatactgcccgttcacttacttccatcaatattaccatgcaactcctgtcatgggatgtattctggggaagtttactggccattcctaccggattgatggtaatgaagaaagcacgaccggaaaacaataccccggcccaatcataattcgtaattcataattattaaaaatgaatatatcagttgtagtcccattattcaatgaagaagagtcactgcccgaactctacgcttggatagaacgggtaatgaaagccaacggattctcattcgaagtgattttcgttaacgacggaagtacagaccgttcatgggaggtaatagaaaaactcaaggcccaatcggactgcgtaaaaggcatcaagttccgccgcaattacggtaaatcacccgcactctactgcggatttgcagaagcacaaggagatgtggtgatcacaatggatgccgacttacaggacagcccggacgaaataccggagttataccggatgattacggaagacggatacgatctggtgtccggatggaagcaaaaaagatatgatccgctatcaaagacactgccgacaaagttattcaatgctaccgcacgtaaagtatcaggtattccaaacctgcacgacttcaactgcggtctgaaagcctatcgcaaagatgtcgtgaaaaacatcgaagtatatggcgaaatgcaccgctatatcccctaccttgcaaagaatgccggattccagaagataggtgaaaaggtagtacaccaccaggcacgtaaatatggctctaccaaattcggattcaaccgtttcttcaacggatatctggatttgatttctctttggttcctgtctaaattcggagtgaagccgatgcatttcttcggattattaggatcgcttatgttctttatcggaatgatctccgttatcatggtaggtgtcagcaaactgcacgcaatgtacaacggtctcccctaccggcttgtaaccgattctccttatttctatctatcgctcacagcgatgattatcggtacacagttattccttgccggattcttgggagaactgatctcacgtaatgcccccgaacggaacaattatcagatagaaaagaaaatttaattcacgcccaataaccgattatgaagaatttaattcgtatctttttaatagtagtaattgttggtgcaggtataagcatcggcagttcgtgttcggacgaaaatgattgctcgctggcgggacgccccatgatgtactgcacattgtacacaattgacgagataaccgatctcagggtaaatgacacactggactcattaacaattacagcattgggaacagactcaatcattctcaacaaccagaaaaaagtacatacgctgatgttaccgttacgctataccagcgatactactgtatttatactctggtacaatccgaatagtcctactaacaaaaaagatgttgatacattatatattatacaaaaaaacacaccgtattttcaatcaatggaatgcggatatatgatgaagcagaacattctcagtaccaaatttggaaataccaaaaatagttcggaaagaatagattctctacatatacaaaataaagaagccaatacaaatgaaattgagaatttacaaatattctatagatatcgcgaccgcacgcctcctacgattgagtagtgtgctgctcctcttttgtattggattaccgtcaattgcacaacagcaacaacaacgaccgggtcctgtacagaaaagagaccagaagaagaaagaggttgtagtcgatactatcccgttttataatgggacgtatgtcggtgtggacatatatggcatcggaagtaaaatgctaggtggcgacttcatgagctccgaagtcagcataggcgtcaaccttaaaaacaagttcatcccgactatcgagtttggtatgggaggaacagatacatggaatgaaacgggaatacactacaaaagtaagaccgccccattcttccggattggtgtagactataacacgatggcaaagaaaaaggagaaaaacagctatctatatgtaggtctccgctatgcgttcagttcattcaaatatgatgtgtcaaccctgccggttgacgaccctatttggggaggaagcatcggaaatccgagtctggaagacgactattggggaggaagcgttcctttcagtcatttaggaatgaaagggtctatgcagtggtttgaattagtggtaggtgtcaaagtacgtatttataagaacttcaatatgggctggtctgtacgcatgaaatataagacaaatgcttcgaccaatgaatacgccaacccttggtatgtgcccggctacggaaaatttaaatcaaataacatgggaattacctattcccttatttacaaattacctctttaaagaataatgacaggactagagatttggctgcttgcaataggcttagcgatggattgtttcgctgtttcaattgcaagcggtattattttgaaacgtattcaatggagaccgatgctggtcatggctttggcgttcggactttttcaggctctgatgccattcattggatggatgtttgcaaagactttcagccacctgatagaaagcgtagaccactggatcgctttcgctatccttgccttcctgggcggacgtatgattcttgaatcttttaaaaacgaggactgccgtcagacatttaaccccacaagcccgaaagtcgtattcacaatggcgatagcgacaagtatcgatgcactggcaataggcatctcctttgccctgctcggaatcaacaactataccgaaatcctctctcctatccttatcatcggattcgtatcattcgtcatgtcactcattggtctttacttcggtatcaaatgtggttgtggatgtgcacggaaattaaaggcggaattatggggcggcatcattctggtcgctatcggattaaaaatattgatagaacatctattcttacaataacaagcattggttcctctaataaaaaaacagaaaaacgtatgaaaacaaaaaagagtttcctttggctggccttcctcatcttggcaacaatctggatattagccagacgtaaccaaaaagctgagtttaataccgccagtggttttgtgtttggcacagtatacaagattgcgtatcaacatgacgctgatctgaaaccggagattgaagcggaattaaaacgtttcgaccagtctctctcaccgttcaatgacagttcggtcattagtcgcgtcaatcgcaatgaagagctagtgacggacagcttttttcagacttgctttaatcgttccatggaaatctcccgcgaaacgaaaggagcttttgacataacgatagctcctcttgccaatgcctggggatttggctttaaaaaaggcgccttcccagattcattgatgatagacagcctgctacagattaccggttacgaaaaagtgaagctggagaacggaaaggtagtcaagcaagatccgcgtataatgttaagttgcagtgcggttgcaaaaggctattcggtagatgtaatagcccgtctgctcgaccggaaaggaatcaaaaactatatggtagatataggtggtgaagtagtagtaaaaggtaaaaatgcgacaggagatctgtggcgtatcggaattaacaagccgtacgacgactcattagctgttaagcaagatatacaagtagtactcaacctgacagatttaggtatggctacttcgggaaactaccgcaactattattataaggatggcaaaaagtatgctcataccatcgaccccagaacaggttatccagtacagcacagtatcctgtcttctactgtgattgccgaagactgtatgacggctgatgctttggctacctctttcatggtaatgggactggaagaagctgaaaagttctgtaaagcaaatcctatgatcgatgcctactttatatatagcggcgagaatggagagtttaagacttactatacggatggcatgaaacgatatatgcctgatgccaaatagaaaaatgctttgcaaataagcatataaacggaggctccatttcatacgaatagagcctccgtttatataaaacagcacctctgttgaagccaaacgaagcctctgtttcagagtggctgaaacagttatttcataaacacaaaataaacagctgcaatcagacaaacaaatgctgccagatggttccagtgcaaagtttctcccttaaagaaaacggtggtaaaaacagtaaatatgatcaaagtaatcacttcttgaattactttcaactgcatcaacgagaatggaccgccattcccgacaaagccgatacgattcgccggtatttgacaagaatattcaaaaaatgcaatgacccaactaaaggtaatcacacctatcaacggaagagcagcaaaccaagaatactcttgtttcatctttaaatgcccataccatgcaaaggtcataaaaacattggatacaatgagtaataaaattgtatagaaacctttcatcttattatatactaaaattagtaattatcagtctattttatccggcaataattcttcctgcacattcgtcatgctcccccacaagctgtagcgagcttccggattcatcgcttccaactgccgcagaatacctttcatatcgcttcggctggactgtgattcataaggacaattcttcacttgcttccggtagtcatgcaatgcagccagttcaaccagatcagcctcgtgcaccatacacatcggtcggataattgtcatatcaaatttcttcatcaccaaacggggcggcatcgtgctaaatgccccctgataagtaatgttcatcaacaatgtttccaaaatatcatccatgtgatgtcctaaagcaatcttattgcatccttgctccttggcaaccgtaaacagagctttccgacgattccaggaacaaagaaagcagggagacttgcgcgtatccgtagtaggatcaaaggacgtttcgtactgtacgaaaggcactccaaaagattcacaatatgctttcagatattcagtatcactttggtaaggaatattattcatcaccacatgaacagctatcacagaaaaccgaggcttataaatacgcgcccgcttgcccagcaactctacaagtgccaacgaatctttcccgcccgacagtccgataaggattttgtccccttcttctatcagtctatactgcaccactcctttattgaatcgccgttcaatacggcggatcgtcttctcttcttccgtaaattgtgtcatatcttcaaaaatcggctgcaaaagtaagcgaaaagaatgatttaaagaagaattaacataatagaatctctgaaaaagggtttatttctaataaatttgtacttttgaacaattgatgcatggattagtgaataaaacaatgaaaagaaaatatattctatttataatttgcagtttcttcctcggaggagtatctgcacaaacattggaacaggcacgcaccttatttacaaaaggtgactacgaacaagccaaacccgtatttcagaaatatgccaaatctcaaccatccaatggtaactacagctattggtacggtgtctgctgcctgaaaaccggagaaccggaagaagccgtgaagtatctcgaaaccgctgtaaaaagacgggtagccggtggacaactctatctgggacaagcttacaatgatacttatcgtttcgaagatgcagtcaactgctttgaagaatatatcgccgacctcagcaaacgcaaaagatcgacggaagaagctgaagctctattggaaaagagcaaagctgacctgcgtatgctcaaaggagtagaagacgtgtgcattattgacagtttcgtggtagataaagcaaatttcctgagcgcatacaagatcagtgaagagtctggcaagctatttacattcaacgaattcttccaaaccgaaggagatcatccgggaacagtttatgaaacagaaatcggtaataaaatctattatagcgaaaagggagaaagaggaaatctggatatattctccaaaaataaattactgaatgaatggagcaacggtcgcccgttgcccggcagcatcaacgaatccggaaacgccaactacccgtttgttttatcggatggcgttactatttattatgcaaccgatggcgaaggactgggaggatatgatatttttgtcactcgttacaacacaaatacggactcttatctgacgccggaaaatgtgggaatgccgttcaattcaccttataatgattatatgtacgtcatcgacgaatacaataatctaggttggtttgcctccgaccgtttccagcccgaagagaaagtctgcatctatgtattcattcctaattcgtctaaacagacttataattatgaggcgatggacccgcagcagatgatccgtctggcacagattcattcgctgaaggaaacttggaaagatgaaaatacagtaacggaggcactgcaacgtctgaaagaggcaatcaatcataagccacaggaacgtcgtgtggttgatttcgagtttgtcatcgatgatagcacgacctattatcagttgagtgacttcaaatcacccaaagcaaagctactgttccaaagttaccggcaactggaaaaagattatctgcaacaggaagataaactgaacggtctgcgccagcaatatgcaagcgccaatcaacaaggaaaagaaaaacttgctcccgcaatccttgatctggaaaaaagaattctgcaaatgaatgaagagctggatgctcttggagtaagtgtgcgtaatgccgaaaaaacaaaatcaaaataatacagagttatggacatactgattatcaccgttctcatcattgctgcagtaatactatttttggttgaactgtttgtcattccggggattagcctggctggcatttcagcacttgcttgtattctctatgccaactattacgctttcgccaatctgggtatggcaggaggatttatcactttagggatatcggctgtcgcctgtatcggctcgcttatctggttcatgcgttcgaagatgctggataagctggctttgaaaaaagatattgactcgaaagtagaccgcagtgcggaaaagagcgtcaaggtaggcgacacaggaatcagcactacccgcctggcacaaatcggttatgctgagattaacggtaacatcgtggaagtaagatcgatagatggcttcctcaatgaaaaaactcccatcattgtgagccgcatcactgacggtaccattctagttgagaaacacaaaatataatattcacttaatataaattatcaatggaaacatctttgtacttacctatcgttctgattgttggaggtattattttcctaatactatttttccattatgtgccgttcttcctttggttgtcggctaaagtatcaggcgttaacatctcgttgattcaactcttcctgatgcgcatccgtaatgttccgccgtatatcattgttccgggcatgatcgaagcccacaaagccggattgaagaacatcacccgtgatgaactggaagcccactaccttgccggaggccatgtagaaaaagtagtacatgcgctggtatccgcatcgaaagccaacattgagctgtcattccagatggcaaccgctatcgaccttgccggacgtgatgtgtttgaagctgttcagatgtctgtaaacccgaaagtgattgatactcctcctgttactgcagtagccaaagacggtatccagctgatagcgaaagctcgtgtaacagtacgtgccagcatcaagcagctggtcggtggtgccggagaagataccatccttgcccgtgtaggtgaaggtatcgtttcctctatcggttcttcggaaaaccacaagtcagtactcgaaaatccggattctatctctaaacttgtactccgcaagggattggatgcaggaacagctttcgaaattctgtctattgatatcgcggatatcgatataggtaaaaacattggtgcagctttgcagattgaccaggctaatgcagacaagaacatcgcacaggctaaagcagaagaacgccgtgcaatggctgtcgcttccgaacaggaaatgaaagctaaggcacaggaagcacgtgccaaagtaatcgaagcggaagcggaagtacctaaagcaatggcagaggccttccgtagcggcaatctgggtataatggattattaccgtatgaaaaatatcgaagccgatacttcaatgcgcgaaaacattgccaaaccaacgactggtggtaccaccaaccagcctttgagtaaatagtctaccaaacgctggaacccgattcctattcagttcatctgcgtatcttctctttgacaaacttgcaaaagaaaagaaagatacctcttccgaactaaaatccggttccggcgtttctatttatatatacgacttattgtaaaactaaaaccgttcaataacatgaaaaagtactttccatcctctgaactgattatcaacgaagacggctcggtattccatcttcacgtaaagcccgaatggctggcagataaagtgatccttgtaggagatccaggacgtgtagcactcgtagcttctcactttgaaaacaaagaatgcgaagtggaaagccgcgaattcaaaacaatcacgggtacatataaaggtaaacgaatcacagtggtttctaccggaattggttgcgacaatatcgacatcgttatgaacgaactggatgcacttgccaacatcaactttgagacacgggaagaaaaagaaaagttccgccaactggagttagtacgtatcggtacgtgcggcggcttgcagccaaatactccggtaggcaccttcgtttgttcacagaaatctatcggtttcgacggattattgaatttttacgccggacgcaatgcggtatgcgatcttcctttcgaacgtgctttccttaaccacatgggctggtcgggaaatatgtgtgcccctgcgccttatgttattgatgccagtgaagaactgattgaccggattgctaaagaagatatggtacgtggtgtaacgattgccgcaggaggcttctttggtccacaaggacgtgagctccgtattccgttagcagacccgaaacaaaatgataagattgaagcatttgaatataaaggctttaagattaccaactttgaaatggaaagttcggcacttgcaggacttagccgactgatgggacataaggcaatgaccgtctgcatggtgatagccaaccgactgatcaaagaggctaataccggatataagaatacaatcgatacactgattaagactgtgctcgatagaatataagagatatatccatcataacagaatggcttgaatcatactctgtattgtatgtttcaagccattttttcattaatatccaatcgtaaatctctcctgatgatgcttgggatgttccaactcatcgatcattgcagccgcatagtcttctacagaaatatggctgttacccacgatatccacaatcatatcatctttgcccaaacggtaacgtccggtgcgtactcccggtctcatatctgctgccggagagaaaaatacccagtcaatctctttctccttcatcaggaaattcaaataaaactctcccaaagctttaactccgggcaggatattctcaggaacttcacccgaatccatcagtcgcaatcccggcgcaataaacagtgatccggcaccacctaccatcaggaagcgatttactcccgctttcttcactccatcaatgatagtcagatatactttgatggtttcgtcatatatatcaggattattccatcccggattgaatgcactgataacggcatccgctcctttgcaaacttcgcatacttcatcgagcgaagagacatccgctttctttactttcagatgctcgttctctatctttattttctcgggatgacgaactacagctgtcacttcaaagccacgattcaatgcctcatttagcagagcggaaccaacaaagccgctagctccgatgaggactatctttttcactttctccatattccaacaaaaattagattgttattattactttaataacaatctaactttcagaatgttggtctccttttagaaaattaattatccgatataggtttctatcgtttctttcagtttctccaaagaatatggtttggagataactgcattgcatccagcctgaatagcctgttgctgttccgtatagaacgcataggcagtgactgcaataataggaaccgaaagagaaatagttcgaatcttctctgtagcctgaatgccatccatcacaggcatacgaatatccattaatatcaagtccggtttttcccgaataaagctattgattgcttcctgtccgttacgcacccacagaatagtatactctttcttcagtaagatattcaactgggcaaagttcgattcgatatcctccacaaccaaaatctttttatgacgtacggattcagaatcaatcttagtagaaagactccgttcggcaacttctaccggtatctcctgataaggcagataaagcgcaaacgtactaccttgtcccagttccgagctaacttcaatacggccaccgagacgttctacaatactcttgcaaatagaaagccccagtccggtaccttgcacaaagtcgttcagtttttcaaaacgagtaaagatttgaggaagtttctcttccggaattccacagcccgtatcgctgacaaacagtttcagccagtctccctcctgtttcaatcccaatgtgatacttcccgtttcagtattcttaatggcattggataaaaaattgaagagtacctgcatcacacggttccgatcggtagaagtccaaaactctccttgcggacgaaccactttcaagtccacattcaacttcatctttaactgatgcaccttctccacttcatccaccaaaccggctatttcaacttgctggaagtgcatctccgatttaccggattcgatgcgggacaagtccaaaatatcattgatcaactgcaacagcagattgctattcttctggataatctccagatattcatgtttttcctcttcattctccgttaaaaccataatctccgaaaatcccacaatagcattcagcggagtacgaatctcatgactcatatttgcgagaaatacagacttcatccggtcggcatcctctgcacgccgtttcgcttcaattaattcctcggaacgacggatacggtcgccaatatcgtgtattaacgccagcacggtattaccttcaaacggggcgatgcgtgcctgaaaataatgtttactcccctccacttccaatggatattcaatctctttcagattcccgtccttcaggcattcgcgaatattgcaaagaaacaaatcacttacttccggagaataaatactgcgcccgtccgctcctttcagcacttctaccggatgcagcagaatcgtacccggcgccatcagcacatccgttataaagaaattctcgtcaaagatgaagataaattcgggtaaagcttctattattttacggttatgttcttccagatgtttaatatgctgttccttttcacactgggaggtaacatttacagtatatgccaacagtttatccggatctccttcttcattccctttataagacaagaaatgatcttccagccaaatcacttcaccatgctccccgacacaacggacctgtatctgagatgctttggactccgaagcaagcattttagcaaaagctgtctgataggcatttatatcttcggggtatgcgaaatggtaaaagtcattaatgtctttaaagactactcccgcctctttcaagcctaacgtgcggaaataatcgtccgtgaagctacatttccctgtcggaatgtcatattcccataaagctatttgatgtgcggcaagtacagaaagtatcttttgtgaattttcccgtatgatttcattattctcattcggtgaatataagtttgtatccggctccatagactatcattatattttgtatgtgcattgtttgaacggcagcaaatataaacaaataaaacacaagttgtgtctaatcttattttttttacttagaaacaattatctttgcatcatccaaaaagaaatataatgaatcaagatactatctgcgctattgctaccgctcaaggaggagccatcggaagcatccgtgtttccggtcctgaagctatttccattacaagccgcatcttccaaccagccaaagccggcaaattacttagtgaacaaaagccttatacgctgacattcgggcgtatctataatggagaagaagtcatagatgaagtccttgtgagtcttttccgggctcctcattcttatacgggagaggatagtacagaaatcacgtgtcatggttcttcctatattcttcagcaagtaatgcaattgttgattaagaacggttgccgtatggctcaaccgggagaatatacccaacgcgcattcctcaacggaaagatggacttaagtcaggcggaggctgtagccgatttgattgcatcttcttccgcagccactcatcgtttggccatgagtcagatgcggggaggttttagcaaagagttaacggacctacgaagtaagttgctaaacttcacttccatgatcgaactggaacttgacttcagcgaagaagatgtggagtttgctgatcgttcggcattgcgaaaactcgcagatgaaatagagcaggttatctcccgactggttcattcattcaatgtagggaatgctattaagaatggtgttccggtagctatcatcggtgaaacgaatgcggggaaatcaactttactgaatgtattactgaacgaggataaagcaattgtcagtgatattcatggtaccacgcgtgatgtcattgaagatactattaatataggtggcatcactttccgattcattgatactgccggaatccgggaaacaaatgataccattgaaagtcttggtattgaacgtacattccaaaagctggatcaagcggagattgtactttggatggttgattcatctgatgcatcttctcagataaagcaattatcagaaaagatcattcctcgttgtgaggagaaacaactaattgttgtattcaacaaagcggatttgattgaggaaaagcagaaagaagaattatctgctttattaaaggactttcctaaagaatacatgaagtctatcttcatatcggcaaaagaacgtagacagaccgacgagttacaaaagatgcttattaacgcagcacatctgcctacggtaacacaaaatgatattattgtgacaaacgtaaggcattatgaagctttaagtaaagctttagatgctattcatcgagtgcaggatgggcttgattcacatatatccggagattttctttcgcaagatatacgagagtgtattttcttcatttcggatattgcaggggaagtaacaaatgatatggtgcttcagaatatttttcagcatttttgcattggcaagtgatggcttagaatctgccataaccaactataaccattcagaacaaagtcgctgtatttcagcgacttttctattttaacactttccaatccgtatttggaagtaacggtttttatccatatttttctatcatatttctaccgcgacacaaattcacggttagcccgaatgtcacagtgacgcattagttgacgtgtgttgacaatggtttacatgtgtagacaaaaagggaaattaaaaaacaaagaaaatgatatagaaatatggaagtaaagagaatttgtcaatggtgcggaaaaccattcattgcacagaaaacaacgacctgttattgtagccctcaatgctcgaagcgaggttacaaacatcgtatcaaggagcgcaaaatggaactgcgccatattcaggaaatgcaggagttgcgctccagtttggagaaacaagaatatttcactttttcgcaggctgcccgattgatgggtgtgagtcgtcagtacatttataaattagtcaaagaggataaacttagagcatcccgaattagcggaagaatggctttggtaaggcgtgcagacatagagttaatgctcaaaagcaaaccttacgaacgactggttgcgaaaaacgacttcaacatctccgagtattacacagccgaagagattgcggaaaaatataaggtcaacgccaaatgggtgtggacttacactcggcaacataaagtgccgaaagtgagaatccgccagttcaactattacagcaagaaacatatcgatgctgcctttgccaaatacgaggtagattccgaccttactgaatggtacacaccggaagagattcaggagaagtacggtatgacacgtgtcgccatccgttcgcaagtgtatcggaacaacattccctccaagaaagagcatgggcagatattctactcaaagctccacttcgacctctcgaagagttccgaacaggagagcaaggcggaatactacaccgtcaaggaggcgatggagaaattcaaactctctcgtgattcggtttacggtattctgcaattccatcagatcaaccgggagaagaacggacggttcgtcagattcctgaaagtggagtttgaccgggtaatgggtgcccgcaaatagtctaatttatggctatccgtaaattattcaaaaattaatccctgctgtaggtaatctgcatgactacattatagagtttcgccgacgaattaataataaccataaaaatataacattatgcatgaatgcaagaccgtgacattaaggacacgtccgctaaaaggcaggatgatgtctttctatctggattattatccggggtatcgagacaaagagacaatgaaagttatccgtcatgaatcgcttggtatttatatctatgccaatccgaggaacaaacgtgaacagaatttcaacgaggtaatgaccgagaaagccgaagccatccgttgccgcaggttcgagtcggtagtcaatgaacggtatgacttctttgacaagtacaaactcaaggcagactttctggagtattatcgcaagcagctccgtaagcatgaccagaaatgggagtttgtctatctgcatttcaataacttcgtacatggcaaatgcacctttgaagagattgacatcgacctctgtaacaagtttcgggaatatctgctgaatgccaagaagctaaggcgtaacggacgtatcacacggaactccgcatcaggatattggtctactttcagaggtttcctgaaaatactctaccgtaatgggatgataaagaccaatgtcaatgacttcttggaaaagatagagacagaagatgtaatgaaagaggccctgtctgttgaggaactgtacaaattggccgagacaccttgtaagaagcctattctgaaaacggcatcgctgttttcctgtatgaccagcttgcgcatcagtgacattctctcgctatgttgggaagacatcgtggactattctgccggaggaaaatgcgtacacatcattacgcaaaagaacaaggcggaagacatcattcccatcagtgaagaagctttgggattgattggctatagttctgaaaagaaaggtttggtattcaaggggcttatgcgtagctggacgcaaataccgatgaaagagtggattcgttctgccggaattaccaagaacataacatttcactcgtatcgtagaacatttgcaacgctacaagcagctgccggaacggacatccgcaccatacagagcatcatggcgcacaagagtatcaccaccacgcaaaggtatatcaaagtcgtggatgccaacaaacgtgaagccagcaagaaaattaccctgacacggcaagactgacagctgctttgtcctcgatttctgcggtcagagtatgatttttcacctaaaatcatactctgaccgtgatatttagcatgatacgtggtaactatcattctttttattgcaactatctggaatatcgattatatctttagcgcaaaacgattccaaacacttgcagaccatgacgaataaaaaacaaattcagactaaaaagataagttttatcctcgcactgtccgttatcatttatgcggctatagacacttatcttttcctttgccatgacatcaatatcatgcgcataacgactcctgtcatccttggactggtaatagctatcatattatgcggactcctgcacaaatttttctataaatggctgacaaaaaatcctatcaacttctcttttggcgagccatctacccctattgtaaaatcagagaacatcatagaatctatggatgctactgaaacgcagcccatcaagcaaccgatggatttgcctgaacaagagtcttctccatcccaacagtcgaatcaagatactgtaaactctgattgtccgcaagattctcatttgaataaatatgattccatattggtggaactcaaaaagaaagagattgaaaggcaagtggaaatcatggatgcgattcgggaatatgtaaccgtcaaaactgccccctatctctccaaagaggatattgccaccctcattgccaatatagagtatatggcttacgatcaacctgagtcatataaaccgattcgttccaatatagacaatccgctgaggtcgccggggcttcgccatttggcatggaatgtcggtgaacgcttgagagtgcccttagcgaaaagagccatttttatcaagaaatcatttccatacgaactcgtaaacgcgacccttgaatatcttaaacttaatttacgggataatgtctcaagccagattcccattgatgtaccagataaaggcgactatcgcttccatttagatgtagataatgatgactcgcaataaaaaaagtatgcagacgaaataattaatccggtctgtattgttctgcaaggtttcattgagttggttcgcagcatgttaaacgattaaaacaatcataatatggaaaaagaccaactgacattcaacgacctgccgactgtggtaggcgaactatgcgacagaatcgcaagtatggaaaacctgcttacggagaaactttccaagcagtacgaaaccaaagagaatacgcacgtccccatgaccgtacaggaggcttgcaactatcttaaaatgccgttgtcgaccttttattacaaggtcaagaaggacgatattccggttataaaacaaggaaagcatctctacatctatcgtgacgaactggatagatggctggaatcttcccggaagaatccggctccgcaaagtttcgaggaagagaatgaatccttgctcgcctcccatcgccgtaaaccgaaccctaaaaactggtagcgatggaaaagacagacactattattctttctccggaagaattggccgcttacatggcagagtctacaataagcgtaacaagtacatacgaacactccccggtggttctgatggtggacgatactgttatcggaacattgggaaacttcagtgcttccatcgggaaagccaaaagcaagaaaactttcaacgtttcagccattgtcgcatcggcattgagtggcagcagcgttcttcattatcggtctacatttcccgaaaataagcggaagattctatacatagacacagagcaggggcggtatcattgccagctggtattgaaacgcatcttacgtttggccgacttaccggaatacaagaatccggataatctgattatgctggctctgcgcaagttttcccctaaactacgtctggcgatagtcgaacaggccattggcacaataccggatttgggattggtcatcatagatggcattcgtgatttcctttacgacatcaattcctccagtgaatccaccgacatcatctccaaattcatgcagtggacggatgacaggcaaatccatatccataccgtcttgcatcagaacaagaatgatgagcatgcccgtggtcacatcggcacggaactcaacaacaaagcggaaaccatcatgcaggtcgaagtggacaaagaggacaagactgtaagcgtggtcgaagccgtccatatccgtgaccgcgagtttgaacctttcgctttccgcataaacgaggaagccatgcccgaaccggtagggtcctatctgcccaaagagaagaagaccggacgaccaatcaaaggaccgttcgatccggacaaggagattccaaaaaatgtacatcgtccagcattggatgccgtttttgccaatggcaacatcagcaattacgatgattatatagaacgcttgaaagagggttacggattgcagggtataaaactcggttataacaaggcggtaaaggtcgcaacattgctcagcgacaaacaaatggttataaaagaagggaaagattatgcattcaatccagaataccattattgagttcaactttactttattgttggggcatatatataagaataaagcaaagtcggaggaagacatcatgtgagatattcatattctcccctcttttagagactcgtatcatcctatgtttcctatccgagtgccagttcactatacgcatccgatatggcttgtcgtgaagcatcaacaggtaactgttgcgagatatgccaaggtataacctcactgcgttacggttgtacattggcgctctcgcctgctcagttccctcgccggtgcggtactcgcaagctcgcacctattcaaccattataaaataattcaaatgaaagaagatattaaaaatacatcggactcctcgaaagaaaccagaaacgtcttcatcggagcaaaagtcactcctactcagaaggagcagataaaatcactggccggacaatgcggcatgactgtaagtgactacatattatcacgtgcgtataacttcaagcccaaagcaaggctcacgaaagaagaagcggtattgttacagaatctggacgattgtcggtcagacctcgtaaaatacacctccgccctacacggaatgtccacaaagcaacgtatggtaatgttcaatcagattccgtttatggtgggttggctgaaagaattaggcaatgtagccgaaagtgtctgccagttcctgaatgcagtaaaagagaagaataaaattccgtctaacccaaaatccgaagaagaatgattgcgaaagccaaagccatatcgcacggtataaacgacatccgttacattaccggcgaatcacagcacaaaaaacatccggaaaagatttatcgggtattggacaatctgttgccctcagaaccggacgctatgggaatatggagctccatgcagttgaccctatcccaacatcgaccgataaagaattccgttatcagaatcgagctgagtccatcgcccgaacatacccaattttatgacatcgaagattggcaaaatctttggcaggaattcgccgaggagttcgacaaacaagtgattaccggcaaggatggacaagtccgttcctgtccgaccaatttggtgggtagcaaatactcggtttggcttcatacggaatctaaaggcgaagttccccaccttcatgcagcggtttgccgtttggatgaaaacggtaatatcaacaacgaccacaacattcatcttcgggcgcaacgtgcagccgagcgagtggcaaagaaacgtggctggacaacagcggcacaaatcagaaatcgaaacattccacaagtgaaccgggactgtatggaggtgttgaaagcaatgccatcgtggtcatgggatgagtacaagaatgctcttatacggaaaggttataccgtccatgaaagagaggacaagaaaggtattcttcgtggatatgccctcatgaatggaaacaccaaatacaaggcttcagaattgggaatcggcagaaacctgatggtctcgaaacttcctgcgacatgggagaaactgcatcatcagccagctactgccattagaaacaatacaccccaagccgttcaacaggcagcgatacataagattgctcctatcgactatacccaatatctcacatatagtcaggagatgatttcctataccctcagccatgaaggtaaggattacaaattttatatcccggaaaaagtacttgattgtttcaatgacgaatttgattacaggtttattgccaactgtcaagaacttaccgatatggctgtagctatatttgtcggactgatagatacccccaatgtaacaaccggaggaggtggcggtggctcacaaagcgaccttccgtggagagataaggacgaagacgacttgctctgggcgcgcagatgtgctcgtgccgccagccggttcttaggaaagaaaccgaaaacaggattaaaacgataagcgcatgaagaagaaatttgatttttccgcagaaatgagtgaagcggaatccataagatccactcccaagaatgaatatctggaggaagaaaaccacttactcgatatcaatgtgcaagaacttgctaggctgaataacaatgtatataagctgagaacagaagttgaaaatctgtccggttctatacgtgagtgcaaacctatcatttctgaagaaatgcataagttggcagttgaatttggagcaaggcttctctgcaattttcttgatcagattgagagcaaatgcaaggaagccgagcggagaatgaagaaagccgacaatgccatccccctcccatatacggcattctacattttgattatcattgtagtcgctctatcttcttttttcgtgtgcatgatagtggctaatgcagagattttgcattccggattgatttggaaggctactactggttgtattcttatggctgtctcggggattggtataacggtagcaatacagaagtttttggatagaggtaaataaacgaaaagtctcaatcggatagagattactaccagttgagactttattttcatgcttaaattagtcttctaaatctcttgcgacttcagggaaattatctttaatagttcctttgataccaccatgtatagaatactgcctgacttgagtagtttgaacttttgaagactcatgatcttctttggaatacagaataggaactggttctgactgatagtagtttaacctgtctgtatttatatatcttatttcatacgcctcttcaaaaggagttatgagatatatccttattgatgcatcaaatgtgtatatctgttgacggcataattctccgggcaaaatagtctttgtttctccttgccgtatttgaatataatcgcttttcggttttaaccttacatctaaatgatgacgagcctcatttatcataatgcgatacacttctaccggatatgaattgtttttaatctggatcttcaatccccacatcgtatcattcttcaaacttatctgaattttgggatatatgttacttccagcttaaattcgctctaattgataatgacgtgagtacatctcagccatttgcgacaagctattaatctgctgctgagttcctttctgatttcttaagacaagaataaaagttgcagctgtcgccaaggctcccaaagccataatacaatcaacaataatctcaaataacataattactttctaaaatgatattcaaatatacaacataattctgaatcacagaacaattgagagcgaagaaattacagcattaattccctcgctctatacataactttatttacccagtgacttgaacaccttagcaatgcaacgctttttctgctccatattgggatgaacatataagtccaacgtagttgaaatattggaatgccctaataatacgctgactgttttatagtcacaaccgacctctatacaacgagtcgcaaaactatgacggagtccatgatacttcagcttgggaatatcaagtttctccataagccttttatagtagttacggtacgtacgtggttctgtcggacactcgtcattggtaagaatgtaatagtcatcattaactacttttttcaaaggctttaacatagtaagcaattctttgtttatcgggatttcacggcaagagttttttgtctttggcgtgttgatgaccagctctgtatgttttctctctccttctatgatatagatgcgttctatcgtccggttaacggttagaattccatcatatacattgatgtcgctccatttcaaagcacagatctcccctatacgcagaccggtactaaggctgatatagataccaagtcccggaaaggaaaagtggctctgaatatagttcagaatctttttatgatttgccacggacaagacctccaactttttaccagcaacgtctgttgggtacttaatatcccattcgtaatagttcatccattcgtttttcactccgaatttcataaccatcttcaggacaataagaatgtccttaacagatttcacgctcaatccgccttccaacttttcaagcacaaagccttgtacatcattttcatgaagttcgttactctcaccaaactttggcaaaatgtgattttcaagaatcaacatgtaggctgccaatgtcgatagtttcacatacggtcgcttgtcctctcgccatgcgtccgaaatttctctaattgtcttctgaatcataattttgaatttaattggttctaataattagagaaatataataggtaatgttccccatttgagatttccggaatttagtggggagtgggaaatctatcctcttacagattttatgagtttcaaaaatggaatgaatcctgatgccaaaagatttgggcgtggaacaaaattcatttcggtgatggatattcttaataaccaattcatttgttatgataatatccgtgcctctgttgaagttgtggatggcgatattgaaacttatggtgtaaactacggcgatatcttatttcagcgcagctctgaaacgttagaagatgtaggtcaagccaatgtctatttggatagcaaacccgcagtgtttggtggttttgttattcgtggaaaaagtaaaagtaactattatcctatgttttttcgttatcttttggcttcaccaactgcacgaaaaaagataatcgtaaaaggagccggagcacagcactttaatataggtcaagatggattaagtaaagtttgtcttaatattccttcaattcaagaacaagagaaaatagcaaaactatttgaatgtatagatactcgaatcgctacccaaaacaaaatcattgaggatttgaagaaactaaagtctgcgattagtaaacatttgttcgcacgcaaagatttgttagaaactactatatgcttgtcgaatattgcgacattgaaaaatggttacgcattccagagtggcaagtataatgcactgggcaaatggaaaatcctcacaataacaaatgtgtctggcgagcgatatataaacgatgaagattacaattgcataatcaacttgccgaacgatatacaagaccaccaagttttaaaagaaggagatattttaatctctcttacgggtaatgttgggcgtgtttctctttgtaaggatggagactatttgctcaaccaacgagttggtttgttacaacttgcgaaaaatgtaaatcaagagtttctatatcaaattttatcttctcaaagatttgaaaatagtatgattgcttgtggtcaaggtgctgcccaaatgaatattggcaaaggggatgtagaaagctatgtattaccatattcctcgaatgtcaataacattcttttggtcgcaaaaatattacactcatacgatgagtacatcattaatgagcagcggaaactaacattgctaaccatgcagaagcaatatttccttgcccagatgtttatatgaacatctgttgcaatagatatagcttttgtttctgcatgacattctgtattctttcttcaatctcggcttttctttcaagcgatgacagaaaagttgagatttttatttgccactcaatttttggtactattattttgaacattgccaagtctttcttctgaatattgggtaagccagaacctatacgcagtttcattatggcatcctcattcgatttaagataatggtacaagtacatattatccaccttgtctgcaatgttttgaatggaataacaatgaccaccgctccaaaatggtgaggtgttgaattgtacatacccacaagagtttccgccctcacttattgaaatagtactggcttctacattgtaattgtcataatagccagatggctctgtaccaccattcattacataataattaccactatcagagagattttccccattgatttgtttacccttaacaatgtcacatagatcagacagtagaacagtaaaaccttttacgcttttgaaaagtctttctgaaatcgcagacctacaaactttacaatccttaatcaaaggaattgcacagcattgcattaaagaatcaacaagtggaaacacatatgtaaaacttggtgatatttgtcaaattacaacagggaaacttgatgcaaatgcacaggtagataatgggatttatccattttttacttgtgcagaacaaccattcaaaattgatagcttcgcttttgatacagaagctttactaatctctggaaatggtgctaatttgggatatatcaattattataagggaaagtttaatgcttatcaaaggacttatgtattagacttgttctccgaaaatatccaatacattaaatgggcgttaaaagtactgctacccaaaagaattgcaatagaaaagagttcaagcaacactccttatatagtgctatcaactctcacggatttaaggttgcctataccttgtaaaagtaagcaaagtttcatcgcaaacctaatgcaatctttggaaagaaaactatcaaatcaaatcgcacagtatgattcctataattatttgaagcaatacttgctccgccagatgtttatatgaacatttgacggagtagatactgcttttgacctatataaagatttaatactttatgattaatatctattttgtcttgaattttatcaaaaataattgccttctgtttttgttcagaaatagtgggcaatgttatttttaacttttccaatggagtacgtactatttgcggctgtccagagccagaaataatactattgaagttatacgcagaaagataatgatataaatatctcttacacaccttatcttgatacttatctgtatttatcaccattgcatttccagttatccaagacattggttttgtataatttaccataccacaagtatttccacggcaagttatacaaatttgttccgtttcatgattgtaatccttatatttgccaataatcccatttgccccatatacaagaaaaccatcttctgttaattctgttgaagatattgtttgcggctgatatatttgtgcaatttcgcttaaatacacgttattgccataaactctttgcatacaacatactcttagtcctttgattaaggactgcagtttctcaatgattttgttttgggtagcaatgcgtttgtcaagtaaatctaataatcgagatattttaagttgctcttttttgtcgggtgtataataaagatgaattgttgctaagtcctcactattaatagcagggtaacttgaacctgtgcaacgaaccattacttttctattgaattcgtctgtattcaatagatgataaatatagtttggcaattctgttgttctaatttgagcatatccagtagaagcaacccattgttgattactcgtatttagaatcctatgaatatagttgtttttctgataggggcgcacacattgaaacagaatatcattgttatctataacacgttgtgctctacttggtgcttcttctcgcattatttcttgtatttttcttaactcacctttttcaacggcttccaagtctatataaataaaagtgttctgaagcggatctgattttggatttatagtggctatatcttgaagtgataccatttcccactccccactaaactccgggaatctcaaatggggaacattaaggactttattttcgttattatctgtcataatcattattctttatcgggattgatatcaaacggcaacaatttgtcgccattattaaaccggtcgaaatcagagataaacgaacggtcttgaatcactttatatttttcatactcaccatacgccttctctcgtgcttcttcttgagaaactttaccagctgaatcttgtacttgatagtccattgtagcaagaaactgttcaagacgctgcttccattcggccatcgttgtaatgatatggcgttgggcacgctgctctgcaaattcaagaaatacgttagttatgccgttgagttctgaaacctctttgtctgacaagtagttctttgccacaatcgtatcagacttctggactctgccatcgggagctttcttccaagtggtcaatcccatgtgcggcatttccgagtcggcacgttcatatactatttcggcagcggtacgatgagttacagccaagtgcatcatattttgcaccatcttgaagaacaatttggtacaatccgatttcgaatcgtaatcggcactgcattcggcatagatgtctgttatcttttggtagtatctgcgctctgatgtgcgtatctcacgaatacgctccagcaaatcatcaaaataatctttgccaaagtgttttccctgcttcaagcgttcgtcatcaagggcatatcctttaataataaactccttcaatacagatgtagcccagatacggaattgagtggcctgatagctattgacacgataacctaccgcaataatggcatccaaattatagaacagaggtgtacgttctacatcccgttctccctctgattgaactatcccaatttttcggatagttgcctcttttgtaagctcgcctgtttcgtaaatctgaccaagatgatagttgacagtccgtacatccaccccgaacaaatcggccatacgcttttgtgacatccaaaatgtttcactgttgaatatcacttctattcgtgcctcgccttgcgccgttttatacagcaaaatgttagaactcaacgaattttgcatcaattcgtttgtcgaaattgttcgagtaaaataatcgcgagcttgttgtaccaacactttttgggcatcggcattttcggcaacaatcatacacgccatacgcgaaagacggaagatattgaccttacggaatgagccgcttccaatccttaccatatcaaccgcttggttgaaatggtcgtctacattcattcctttttcacctgccaccttgatagccttgtctatgactctttggaatttccaataagccgaatagcccatagcagcgcacaggtcgcgagaactccagtattcgtttccgccctcatcctgacggcgtatattgtcgaatgatggacgcatttcggggatgttgtctatctctgccatagtgtaattattcaaccagtcccaattctttcaaatagccttctatttccttatccagttcggctcgcttggcttccaattcctttatttcagccatgactgctttgatgtcaataggctcttcttcctcaaaagtatcgacatagcgaggaatattcaaattatagtcattttcggcaacctcctgcaacgtagcaagatgactgtacttttcaatttccttgcggtcacgataggtttctacaatcttctgtatatgctgagggcggagtttgttctgggtcttgaccttttcaaactctttgctggcatcaatgaacaagatattatcgtcttccttacggcatttcttcaatacgagaatacaggtcggaatacttgtaccatagaatatattggctggcaaaccgataatagcatcgatatagtttttcttctctatcaggaagcggcgtataacaccctctgcattccctcgaaacagaactccgtgcggagcaacgcaagccatcgtaccaccttcattgaggtgatgaaccatatgcagaataaaagcatagtcggctgttttcttaggtgcaagtcgtcctgctttactgaaacggtcgtcgttgttgaatttgtcggcagcactccattcggcagagaacggaggatttgcaaccactgcatcgaactgcatatcatcgaatgcgtcccattcaagcgtatcgccattctctattttgaagctgctgaatcggataccgtgcagcaacatattcattcgggcaaggttgtaagtagtcggatttttctcctgtccatagatatatgccgccttaccgatacttgctgcacggagcaatagtgaaccactaccgcaagtagggtcgtaaacattacgcaaacggttatgcccaagagtaacaatctccgccaatatgcggctgacctcttgcggagtatagaactcaccggctttcttgcctgcgccggctgcaaactggctaatcatatattcgtaagcatcgcccaaaatatcaatttcttgcgaggcctctacaccaaagtcaatatcgtccaatgcaagaagcacattgctgacgagcgtgtttttatcatctgctgtttttcccaatttaggcgaagccaaatcaatgtccgagaacaatccgccaaaatcctcttcactatcctgtcccaaagtgctgtcttctatacgcttcaacgagcgttccaacataggaagaacattttctttccgcttgatagcctcaattacggacgaaaacaagaacttcggttcaatgaagtagcctatattttccaagcactggttcttaacctcttcctgcaattccggtgcatccgaatcggtcatttcccataattccttgaatgtaacttcatcatcatccaacgcactgttagcgtatgtttctatcttctccgacaggtatttgtagaaaatgaatcccaaggtaaaatacataaaatcgcttgccgacatattgccacgcaaacggtttgcgacctcccaaagctggtcacggagtttctgttgcagttcttcgctcatatctttattgctctatattatcttgtttacatcactttccggcaatggtatattgctctctattatacttctcaggtcatctagcactttccctttatatgagaaatattttgccccttgatatgcacccgatgtattccgtttctcttccggcataaacgtaccgacaaaaggggacaatttataaatacgaccttcgtattcaacggaatcatcgcttgccaccttgacttccgtatccgtaggaataaaggtaacgcattcccctattttaataccgaccatgctgaatttgaaacgacctcgctttacggttcgcttctgcacgacaggcaatgaatctttttcgttatggcaaaccggtttattatctacatagaccgtaacaaccgcatcatcaatcatcttggctatgtcattgaatatatccaaagctatttgtggcggcacattgaaaaactcccgattctgacgaatacgcaaatccgtcaaccgatcaatagtcttgtgtacatgcttttcaacatcgttatatttgaccgtctgaatggttgcataaatctcaaaaggcaacggaacagccgtgttgtcaagttccttggaacgtatatctacaggccgcgcacttttaccgatcttgacccaatcctcacgaaaacttggattagtcaagatatacacatatccgggttcatttgtctttaccatatcagtatttcttttaatcccaactgaaagtgcgtatgatattacgcaatctgtctaaaatcctcgtcaacgcctttctcgtctttatcaatccgagatgcttctctttcaatgctttttgtatgatttccggctgctctttttgcaggtagtcatattctttgaggaagtgattcaataccgatgacgatatttcctcttcctcagccaatgagttgacggcattttctcgctcaacggcaatatagtggttcaaccgttcttccaaatcgcttgtaccgtcagctttgtctcgctgaatcatgaagttttccttatcgtcatccacattcttttgaatgaaaccatcgataagtttggctttgctgcgcatttctgcgtctttaatcatcgtatcaatgatattctgacggcgttctgcgtaatcggcactatatgggtcaagttctgcaatgagttcaaggatatatgccacattgataatgtcgctatgtaggagttcaaggcagaaatccacatcaccgaagtctccgtcatccggaacatctgtatcatcatccggtttgggtgacggtgctggatcaacgagtgcaaaagtatcatggatatcaagatacttactcctgaaatccataaactgctgttccgtcatgccgagatcatcagcttcttcgctataatcctcatatatttgaatctctgcgtgtttacggataatatcacgaaatgccaaaacaaactctttcttagccgtttcgctctgcaaaaggtctatgcagtttgtgtccgggtatttcttcagaaaatcggatgcaagttccttgtattcctgtttgatttcttcaaacggaggtcgcactatttcttccggattgttgctgttactgaataatttgatagcagcatccacattgctcttcaaatcacggaaacatacaatctttccgaagcgtttcttttcgttcagcacacggttcgtccggctaaatgcctgcaacaagccgtggtattccatgttcttatctacatagagcgtattaagtttcttgctgtcaaaaccggtaaggaacattccgacaacaaggcaaagatcaagcggcttcatatcggctcgcttctttttcatgcgcaggttgatgtcatcgtaatatgcacggaagttctcagtcgtaaacgatgtgccgaacatttcgttatagtcatccatgatggcttgcagctcatcgacttcgcctgcactgtcattcagataagaacctgtacccattcctgtcagttcatcatcctgacttccattggctgcataggtaaatactgcacctatacgaatcttaggattcagttccttgaatatcttgtaataacggataagcatcggcactgactgcacggcaaacagcgcatcgaactctccgtcaaatgttgacttattgaaattattaaggatgaattgggctatttccgtcatgcgattggtactgccgttctgcacctcctcactgccatgatagtattccacaagaaaaccgagaacattctcatcagcaatggcatccttaatcagatagcgatgcaggcagttgccgaacacctctttggtcgtatgaccatcaactgcattctctgtaaatattggagttccggtaaatccgaatatctgggcattatcgaagaattgcataatcttcttatgactctccccgaaatggctacgatggcactcatcgaatatcatcacgatacgagaatggcgtatcgaatctattttgctgctataccatgtcttgcttacggctgcattgagtttctgaatagtggtaatgataatcttggagttgctatgcagacgttttaccaactcgtccgtattgtccgtaccgtcaacggctcccggttcaaaggcttcatattccgactgtgtttgtgtatcaaggtcatggcggtcgacaacgaacattaccttatctacatcatctaactccgaaacgagttgcgcagttttgaatgaagtcaaagtctttcctgcccctgttgtatgccaaatataaccgttatcattggagttctgcactcgatccaatatcttttctactgcatagaactggtatgggcgcaacaccatcaagcatttatcaccttcatgtaatacgatgtactttccgataatcttaccgagcgtacacttttccaagaaaaacacagcaaacttatccagttcattgaatggcaggtttgccgcatccgtccagttgaatgtaaatttatatccgccattgggattattggcgaaataacgagtgttcacaccattggagatgacaaacaactgaatataatcgaacaacccatgaaaggatgtcttatgatagcgttgaatctgattgtatgcctgtttgagttctactccccgacgtttcaattcaatctgaactaaagggagaccattgataagaatcgtcacatcatagcgacacttctttcgtccctccaccgtaatttggctcgaaacctgaaattcgttctgacaccattgggtacgattaagaaactctacccaaatgcgctgtccgttagccgtatcaagaggatataggtcgcgaagcttctttgctttttcaaagcgagtaccaccttccagatagattaatatcttctcgaactcttcatccgtaaatgagttacggccaacttccgccagttgtttcttgttgtgaatttccaactgccgcttgaaattggcataaagattatcttcttcggtaatctgaacatactcgtagtccatttgccgaagtgtggctatcagtccggcttccaacgccgcttcgctctgtattgacatattcttgcgccctgttatggtgttattacttatctattccggcttgcagtattctgatacctaatgcattttctatcttgcacaaggtttctaatgacagattctcgcgacctttcaacaccttggagacatattgctgagtgcaattcatcttctcggccaacgctcgttgtgtcataccaagttcctccattcggtttgacatagttgcagcgatagcttgcgaatgacacatccacttttcgtctttattctcctccgttccttcaaccaatcctaaaaccgtgtctatctgtttttcagccattgtatacatcaaaaaatacctttgccttactctgtaggcaaaggtagtataaataatcgagatgacacaactttcaggttgttgattgattttttttgagcaaagaatattcctatttaattgctgttatccttaaatcatatctacggctaccagcatcaagagcaacatcatactctttcagtcctttttcaactgcaatcagatgtaattcatccttatcctttgggattatatctggaccataataaattgcattcaaacatccgacatctggaattgatgcataattattctcatcctctaagttataatacagcattctccattcatgttcatgttcgtattctttttggtccttataaagataagatcgataccaatataattgattgactgatatcatggaagacaaaaagttcaaccaatttttatctccaacttgcttaaaatactcgtaagtatgaatatttccctcatccaatgtaacgtcaggtcttaattcagtataaatcacaggaaagagatttacatccattcccaatgagttatatttaaaaatacattttctaagatcgtattctaatgcaaatcccttatacccatcagcatatctatcccacatatattttgactgtacactttctgtaaaacatgctatttttgcactatttctcggatttctaaaacgcgactcttgcttttttatcgcagacccaatgttgttacaaaaatccatatattcatctgtcaatattttatctataatttgttcatccgtatatccacactctctgtagtaacatatttgcgttgccttttctgcccttatatcagaggatttctgggttatatgcgacaatgttatgcgcaatgcatcctttaatgccttttttaaatcttcgcgaattttgtcttgatctatatataaatatgaatcatacttatccggaaacattcctgcatggcataatgaaatagttccggattttaatgattcaatagtataacctttatcgtctattttacgatatctaaaaagtttttctggaatattaggaagtatcaatttgtaaatattactccatacatctgaagttgcagctttatctatattgaacggaatataggattgctctataatttcctgaaattgttttctaaaatctagcatctttaagtcgtgaattgttatatccttttatttcattaactcaataacatcttctggcaacattgcattcccagcatcatctttcggagcactcttaagaaacagcaccggaacgatggtgtagttcttgataaatagtaacaaattagctttacggagaagttcgcctgtcagttgtttgccattctcttgggttgtccatttgcattcgtcaaccagcagatactttttatcgagcgattctgccatcacatcaaattcaacttgttccggctttttgtcctcattgagaaatgggtagcgccttggttatcggcattatgaagtaactcatacacaaaatgtgctttgtctttataaagattctgggcgatttccaatgctccacgatacataggattcttgaagattgtccaagcctcccgaccttgtttactgagtaccttgaaatataattcctcctcctgattcataactgctccttgatttttctgatgacgtcttccacctcttcggtcattattgcaccattttcatgatcgcaagtcgtgaaaagattttctccgagggtataacctatttcctcgtagaattttagtttacgctcccatgaagccttgtattccggaacgacaagcattcccagatgttcccagatgattctatcaccccatggggtttcaaaggaaaagtcgggaatgcatcggtggccattttcttccagtagttgctcgtactcaaattccaccccagcatttaccaattggtttacaattacaacttctgacttgctacgcacaaacagacctttcttggctgttccatgaatcaggccctcaacataaggaatattaagacgttcggctcgaacggaatagtcaaatagattggtatttcgtcgcgcgagcactgaggcttgtggtttagtaaattctctcaaccaaccaatagaatcttgaacaagcaggactacacgcttctttgctctggtaagagctgtatatatcaactcacgacttaaaatgcggccggttttgggcaataccacaaaaaccgtatcaaaatcgctgccctgacttttatggattgtaatagcgtatgcaagctcaatagcagcatcctggtcttcccctttatctcccctgaagccgaaggtttcatgaggtatgccaacatacataacattgatatgtcctttatttatagacttaacaaagcctatctggccattggagagaggatatttttcttttgatggataggattctcgtaatatattttgaagttgaatgactttatcattcttatatatcttctgggttccgatttcctgataatcccctttgcgattgatattatttccaacccatgactgaagataggaattcagttgatatgtaccccatgcgggatttattactggagcaagaatctgaagattttcgagcgctgccggatctgactcaagcgattttaagtcgtcaatacctattttttgcttcaaggattctggcagttcgacatcggaacaagcgagttccttgcaaattgcatccctaaggatttgaggcagatccttttcatcgttccagtaataaactgaaagatcgcctttgagattcttgctttcgattttccaaaatatttcatcggcaaatttctccggtttgtttccactgaaccaagaggccaaagtcaagacatctgaatctccactggctattgtgcgcacaacggtgcggagataggtaatggcagatttcagattggcgtccgcgtcatcacaattaagataatggcataaatccgagaaagccctgcccggacctatcggaggtagctgataggggtctccgataagtattattcggtttatgaacttcaggtcaagcgacataataagcgcatgaaacgtgtcggtagttagcatcgaacattcatcaatgattatattcttagcacgtgagtatttgcgcgagtcttcagttagacgcggtttcatgttttcaaaatcgaaggcgccgagactggcaagaaactgagctacggtttttgaactcacattttcggccatattactgagccttactctcgcctttccagtgggagccagcagcagaacgccttctgcttttatcttgtcagaacagagaaaggatctcactacggtagtcttaccggtacctgcgcctcccgtgagaactgaaaggcgctttttgtccatcatttcaagagctttggcctgctgctcagtagcctgttgactgcgctcgtttgtaggatcataattcttgtctgacatagcgagggatagccagtcctcaccggtaggcttcttaacatctctctttgctctttctcgtagcactttccgaagaaactcctccatttgataatattccttgagttggatagcagtagggttctcatcaggaacataatcgaaggatacttcaaaaaactggcgatgtgtgagaagtatgtttttcgggaggcgagctttgtcttcttccgtcattatgtcgcgcagatagtcctccatctcttttattgacacaagggtatcaccatctgttagaacggaataaagcctttcaacgactaatgatctaaggcgtcgagtatccaaaatggactccgctgcgaacggaggcactggaacattatcaccctgaattgttgggtcggggaaggctccaagatcaattgtacgcgttgaaactttctctataaaattccgagcgcaccattcgctgatgaggtatggattgcttagtatatcagactctacatcatctataaaatgctcaataacatcggattcaagttcaaatctggataaagtgataagacgctcacgtacattacttgtttggccctcccaacttattcgatacgtaggaagagacgagttgtaaacagcactatcaactttgatttccttatttagcaacttttcaaaatgcccccagggattgtctttcggtccacatcctttttttcgcaggtcgctttcaatcagattgccataatctattcccagcgctttaagtgctgaagcgaatgaagggaagggagtgatttgtttcttgacatgctcaatacgggcatcaatccacctgagttgacattgccatccctcgattgagccagccaagccatgtcgaattactgcctccaacgaacgccgagcagcttcaagaatcaatagcattgaatgattgcttataaaatcacaaccatatgatagttcatcaaatatctttccgctactgtcaaatttatccagcgataatttgatctcatcaagagcctgtatctttgacagacccttcccttggaatatattctcatccaactccagatattctttataggggagaatgaagccgcgagattctttcaggtctgggcgaatggaatgagagaacattatctcccataagggatatgtataatcggcagttgtttcgtagtcttgaacaccacaattttttactatatcccccattcccacaatcattcgtaaaccttcatcgtcaatcggattgcctttcttacaataaaagacgcatatcgattcctcggttatctctgagctgaaccatttaagcacatcatacaatcgctcaggattataaacccaagccgaaccgaaaggtgcactttcggcagggcgaaattcaggatgctccttgctaaggtctttctgtgcatccatattcaagtaacggaatggtattccaagagctgaataagctggtatcattacttttgtaggtaataacttagaatgtggattgtctgaattccaagcatatatgtgaataaattcacgctcataagccttgtaattcatgaatcccccattctctccagcacaagcaggacgttcttttgtagttaatttagaccagtcgattccacacgacaactgctcacaatctacttttgagttgacaatattaggtagttgtttacagaatgtattacaacgaggatttgcacatacatgcgaattccaaccattgtcgtgccaaggtactcgaacagatatatgtttcatttttttaatctttttacaatgttaaattattgttatgcaaaatcattattacaattataaactcatctaactgaaactactccatcttacatcgctcatccaacactccggcaaacatatccatctctctcttggaaatccccaatcgtgttgccaattctcgccatccttttatagcttcagttacctcaacaacaatcttttctgctgttgtacggtttagcatatagtcttcgcaagcatccagcaaaatacccagttctgccttattggaggttgatgagacaagcagactctgatactcattcaaagtagggttcatgtcatatgcaggagaaagcgtccaaccttttgcagtcaaaagaaaaccatgattacggaaatgatcatcgctattaccaatgcagatattgaaagccacacggcgatagagttcctgcagattctcttccacattcgtgcagttctggattatgaaatcgactatatccagataaccatgccctgtagttgcattgtcaccgtcattgagtcccaataaagtcattgcagaagcaaagtgaatccgtttcccctcttgggttctgtcgaagcgttgagaaagcaacgtgtgatatttctttcctgttgccagcactttggtctttgcggcatttataccggcttttgcagcaagaaggtgactgaaatgctcccaaagtccggcatcataatcatccttgcgagaagggaacttggctatataaagcgttttatccgtgtctatcacactggctttaggtcttgcacctcccaatgaagaaccgggctgcacgagttgggcaacccatttcctgtcaggcaggacattcccctcttcacttttctcaatttccgcactggccgcaatcaactcccttatatccgccagaggtgggattttcaacaactcacttacatttataaatcctccgtcttttaactccttgaaacggaaagcacccattcgggaaaagtcatcgataccagtcaaaaaatcgaaagaagatagtctccgtaccggtcgcccctcttccatcgcagcaatctgctcacgtcgcaacaacagcgttcgtccccaacgatccggcaaagcatccgagaaacatccgaatatatctttctccggttgcgtatattgctgtcccggataattattgaggtcatcactcagaaataaatctccgtgtttcttcagccattcatcgctgaaggtaaagcaatagctgtccgagccacgaagagattcatagcctaactcgccaacgagttctgtctcgttgagccagtcaaaatcggcataaacatataacatcttcatcgtttactccttttttgaggcacgttcccttgtcttcaaactcaaatcctgcaaggcttttcccaatttatcttctttggctagccacagaatatcatcgtccagttgcagagcatagagcactcgcaaataaattccgattgccacagtcggcgcacctttctctattcgggacacagtcaacggagaacaggtggcacgttctgccacctgagctacgctcaaattcctgcgcaagcgagccagtttaatctgctctcccacaactgacattttctgctccaactttcggggcaacttggttcccattgtattctttgtcatattaactcatcatataatatgcaaagatactactttatatctatttaatgatgtattgcggacgcaaaaatcacaaattcaaaagatacgactattaaatactgattttgctaccaaaatagagatttcaaagaagcagacttctacctttatctatgattatttccaagataaaagccagcttcttcaatttaagcatcactcgatgggcttcaccaattcttcatcctgccattccgcaagagaaacaatcgcattgtattgctccaaagtcaaatccgattcactatcgtctgagcattcgtattcccacggcagttcgtaaacagtaccttcttcctgataacccatatagttatggtacgtattaggaattaaccgcacataatcttcttcgcgcagaatcctcaaaagtttctcggcatcacgaatcaataatggcactccgaccttatatagagcagtggcaacctcaatggccagctcgacatttgccgagtagctattagaaacaactatcatccaaccctgctgtggcaccttcgatgcaatgatgttcaagcgcgaaaaccccaactcgccatagtggtctgttgcaaaccgtataaaatcctccgggctgtcaatgtcatagagtttatctacatctacgaatttcactcgtttgtaatagactacatctcgcagttcttccgggatattcggttgttcttcgtagagacggtttccaatacttcgcttccggtagtatgcctcataagcctcgttagcgatacgataatatgtgcaatattgccgaatggtcatagtcttcagatgaagtgcggaatgttccttcgcagaatcctccaaagcctttatcgctgtttcccgatcttccacattaatcttaaagctcggagctatcctattgagttcctttcgtgcaatccgcccaatccgttgctggcacggcagattgtgcgccacatagtcgttgaacccatcaggatttgcaacaataacatcaaccagcctctgcaaatagcagaaaagtcgggcaagggaatcctgataccatccgtcatctgattctccgtcggcacaagaggagcgatttgttatgacgaaatgcgcatgttttcggtctgtaatgcgaatcgaccggaactcttcgtatttataagaggtaacatgaaaccactgcgtttccgttggattgaacgcaagccagtccgcaaggaaggcttctttgctttgatactctcccgaagcaatcagttcctcgacatcaccccattcctctggagtgggtcgcggtaccacaatgtagaagccacggtattcatcatcccccattacggtaagttgctcgaactgatgctgaatttcaactagacgttccagcatattgccgctaactgtgatttcacaatgacgcatttcacccattgcttctatatgcgaagcgttcaagccaacctcatttgccaaatcaataaagagttttctatctattattctttcatccattgcttaatgctcattaaatttcaacatgctttttcggatcaaacccattcacaatgtgctcattcgcaaaaatatatcccatctgattacagattacttttgtactaccaatctctgtgtctatattggtatgtgaatgtccataaatccaaatatctatccgactgttggcaatccaatcaccatattcgctagcaaatgcactattcagtacggagttcttgtgctgtggatcaatcacctccaaagtaggcaaatgatgagtaaccaccacaatatgaccagccgtgctctcttcgacacttttccggataaaatcaatacaggtctcatgcatccgattgaattcctctacctgtagcaattttccgtcaaatttgatttggcgaaagtcattcatacctttccacacgaaatactcgtcattcgggttaatccgtgaccatagcgtactcaggacaaaatcggtatcatcgatacggattacctgattctgatagaaccctacattctcacggaacatccacttccattgtagccctcgttccatcacgtccgaataattatagtattcgtgattgccgggaacaatcagaacctgcctgtaattatccgaagcccatttccagaatttcatcataggagctattctatccctaagatagaatatatctccagccaaaaccagcacgtcaccggtaacaggtaattcattatgctttaaatatctgctgttctccctgaactccagatgtaaatcgctcatgtattgtatcttcattgctctttcatttttaattgttcaacttgtttttcaataattatcttcatctgtgcaaatgaaaccggcataaagttgttgttatcaacacctacgtcatattgtgtaggatagagatactgaagccgggctgcatcaattccagtgttattcttcctcgtatgcacatggccgaacagttgccatacatctttatagccgccatcaaagcacagaaacggatagtgattcaaatatatcttctgtttatccacttctatatgcatctgcatggtcacatgctcaaacctatcgacatacccctgcctcaagttctttaaatcatggttgccgagaatcagatatatcttgccattcaatctatcaagaattttagtccattcagctgaaccgcccagacagaaatcacccaagtgaaaaacagtatcatccaagccaactgtattattccaattggagataatcgtttcattcatcatttccacatcctcaaaaggtctgttgcagaaacgaatgatatttccgtgataaaagtgggtatcagatgtaaaaaataccttactgccatcaaatttataattcatttcttctcaatttatgtgcatcgctgcacgttaataatctgtttgtcaatcacccatcagacggaaatgacagaaaagcatcgtaagataactgtcacaaatgggtataaaaacaaaatagttggaaagttcggtaaagactctccaactattcagtttatattttcaatcaggggtagaataaactacaccatgctatgttcttcgttggaaagtatttataatacaaggttcaatgccaaagacatgaacacacagtacagattcagggcgtttgttaccccaaattgtgaccttcgataatatgttcatgctatttctttgcattgttagtttttatatcgtttcaaactcagcgcaaaattagcaaataaattccatatcacacatcgctttctgagaaaatccacgtaaccttttgcctatatgccgcataataaaaactgaacctatgcaattaatacacagattcagttccttatcatttagctcactccattgattcccgaataatccgccgagtctctttcttatactccttgcggtcatattcgaatcccctgcacatccaacagctacacggagtacctgttgttttgtaaacttgtgcccatttctcttttgccaattcaaaccaacggggatgctcataatagcttccatcctcacgaatgatgcaatgaccataagcggcataaagaatcatgcgagccttaaacacacgagccatttgttggcgtctccaaaatttgtttcttttgtccatcgtctctttctattaaagttaggatgaacgatgatgttactttggtgagacttaatatatccatagaattatacttttaataatcaaattattgcagctgtatatcattcttaatcttccatctgattagagagaatcttcatcatcctcttcctcaaaaccttctgatgcatttgctatcagtgccttccctatttccaattgtaggtatttcggaagacgaagcagttttgccataagatggctataagtgaactctactttagtgtcgagtattggttcttcttctatgctcgtatcaattttcttaacagcatcagcatctttaataaagtcggaaaagtctggcttctccatccaattttctatcataccgtcatgtttgattcttaaacggatataatccccacaatcatccgcctccggaattaagccattaggtacataatcggtaattttacatattacctttttatctttatcaagcaagaaataggttccgctatcacataccttagcttgaagatataaagttccatattctggtttccaatcaagaagtttatgaactttcaagtcaattatgccagaccacatccctttagaaaccaaaggatacttgttttcatatagctcaccaagccaatcatctgtatagctacacatttcctcattgtatgggaagtatatcaccagatagtgagccacctcattcaaattctgttcttcaattccaactaatatctgttttgccataatcaaaatttttaaatagtagtcaacagactcacatcaacatcaggaatgataacgtccgcaagcctgtcttcgacaaggaatcccatatacaacggaatggtgagtatatctccctcacgtcctacattatattgccccaacttgattgcattcttgacatgatacacatccttatttttaagaatggtagccatactttttgccttaccggtcttagccttgacttcaaggatgacgcattcgcctttgaaccttaccaagaagtccagttcaagcccactgtccttatggaaatagtatagcttctgtccggacttacacaggaaatccgccatgaggttctcaaagatagctcccttatatccaagaagattccccttcaatatatcagcctgagtgccatagtcgagcattgctacaaggacacctatgtcagtagtgtacactttgaaacaatctttgatggaattgccctccaacggcagttccgtaatctgcgtgttatagcacctacggactattccggcatcctccaaccattgaatgctaccgatgtattgagaagaccttcctccctttttgactatggaatattggaatttcttattctccttggctaattgcttcggaatggattcaaaacattcacggatattagatttgtccgcatcatctgcatatttaaccatatcctcttcgtatccggcaataagattacgctgcttcttatatatgagttcgatattcttggtttcaaggaagcaattcaccacttccggcagccctcctacaataacatatctgtatagcagctccatcattgccttgtgaatcccatcgggaacagccttttcgttctcaaaacatgatttgacagaatcgataacagcctcaccgattccgtttgcccatagaaattcctcaaaatccaatgggtacatatcaattacggtttcatatccgacaggaacagaatcttgcccgacatcctctttctttttcttgctttgaccatagcctttcactcctaaaagagaacctgtggcaataacatcaaaacgtccgtctatataaaatgacttcaaggctgtccttgcttccttacattcctgaatctcgtcaaggataatgcaggttttcccttcaatgaaccgactgccttgaatcaaagcagagaggttgagaatgatggtatcgacatctatattgccagtaaaggcagacttcttgtcaggttcaagaatgaagttcatatagaccacactttcataattctcccttgcgaatttctggacaatatatgccttcccgcactggcgaataccttttatcacaaggggctttctgccctcggcctctttccaattagctaaatatgtttctattttccttttaagcataacgcaatcttattctttccgctacaaaattacactttttcgagcgaataaaccaaggttaaatacattttttcaagcgaataaatcgaatttagttacactttttccaacgaatcatccctattacacaacattttttcaagcgaatcacagcataaattatcgaaaccaactttactttatctccgtattcatatatacgttcattaaagtaaagctaacaaaggggagaaaaagagatagcttcgcccaaaccaagccgaaccagacctatagactttctcttttggctgcaaaatatgagcaatctaagtatgaagattgagcaaaatacaactccaagcaaagcaatactcacctcctaccaggtcacaagaaaacaacccggaaatctgtgaatctgtcttccattttgcagcctgaaccggcgaaataatccccgatataccttatctttgcgaagcggaggtttcgaggcgaaagagagcgattttccccattttccctctgttttgagactggcaacgaagaaaagtgttaaatcttcgatttttgacgaaaaaacaagtaattttttgagcagtctatcttttaagccataaactactgataatcaattagcataatatgctgcatcggcaagtgatacaaagaaaagaaaagcataaaaagagaaaatataaatctgtaaagtgcgaaaaatcaatgattttataaggatttgcattttctctttttctccatactttctgcctgttttcatatttttttcgtaattttgtccccagattgtcccccgaaagggatgcgagggacaaaaatctgtcccccgaagacaatgaatcacatctctcattaaaataggaacaggctatgactaagaaaacaacaatccagaaagaacccgtaaaattacgggaaaagaagttggcaaacggtaacgtgagcttgtatctcgacatctacagaaatgggaaacgtcagaaagagtatttgaaactttatctgatcgatgccactactccgctggagcgtgagcaaaacagacagacattggcaaccgcccaggctataaaatccaaacgcctcattgaaatgcagaatggagagtattctttcactcgccaattcaaagaagatactccttttctggaatactatcggaagatggttgaagaaagacacaagaatcctgaatctgacggaaactggggtaactggagaagctgcttgcgttatctcgaaatctattgtgatgagaaaaccacattcaaagatattactccggagtttataaacggcttcaaggattttttgaacaatgtggaaaaagacactcacaagcgtaccggtccacgtagggaaagggatgtgtttcaaggcttgtcccaaaactcaaaagtctcttatttcaataagctccgcgcctgtatcaaccaggcttacgatgaaagaatcatacctgtaaatcctttgcgtggaatcgagggattcaaagccgcagaagtaaagcgtgactatctgaccttggaagaggtaaaacagttggctgctactccttgccgctatcctattctaaaaagagctttcctcttttcatgcctgaccggacttcgtaaaagcgatattcagaaactcacatggagcgaagttcaaaaatttggagattacacaagaatcgtcttcaaacaaaagaagactggcggacaggagtatcttgacatttcctcacaggcagaaaaatacctcggtgaaagaggcaacccggaagatcccgtatttacaggatttacatacggagcttggacttcattggaattacagcgttggagcatggctgccaatatcaataagaatctgaccttccactgcgggagacataccttcgctgtgcttatgcttgacttgggcgcagacatctacacagtatcaaaactattaggacacaaagagttggcgaccacacaaatttatgcaaaggtgcttgacaaaaacaagcagaatgccgtatcattgattccggacattgattaaatcccgtgcttatgacaaggcaagaaaccgttataaagataacgaagattacccgaatcgtcggcgaaatgaaaagccagttggatttggatgacgaaatcgaatttgaagcacttgactcttcgtggatgaatatcggaaaatgggcgaaagagatttgtctatatatggaacaagccccctctcctcttttggcaaaccttataacaaataacgaatttaccgttcctgtcgtaaactatgtacaaagtcataggctggaaattgattctgcatacgtcaaggtaattgactgttatgcgaacaatatgcaagcgttgctgtcactttgcaaaaggcaagaagaggaggtgaaaggcgaatataaagatttgattgagcctttagccaatgaacaggtggctacattattacaaagagccatacgcgcaggtctcttggatgaacactatcagccgatgccgcaaacgaagccgctgcaactgaaagtgatagcctatgctgtatctaccatctgcaaacttcccagcacctacatcctttttgaaaagcaatggaaaagggaatatggaaagcgattcagcacttggcgtgttccaagatacaatacgggactttacgaaacgaccaaagccctctacccggaagttgactttactgaatttgagccaacacatcagacagagacattctacacgccacagagtgaagaagatatagcagtgttgtatcgagatttagtgaaatacggatacatcgcacctgacactggcttgaaaacatttgtcggcattttcaataaaaagacattcagcaagccggtagaatggattaaaacgcaacggcagttgtcctttttcgtctatcaggcattttacaaattcaacaagaaggacttgtggataaaaggagaatgttgtttcagcataaacggacacactccgcacaaagcttgttttgtatcaggttacagttggattaagcgagccggatggttggataggtatgatgttagattaaaggctatctgtgataagttcaaacacattgaaaatacgttcaatgaagaaacttctgatgaacggcttattcatacgagcaaagttgtattttacagtccgaatagcgaagatgagatacattccatgttctctgccctacttgacggtggatatatctcctccgacaccacatttgccgcattcaaaggtattttcgatgaaacggtatttgaacatcctatagtatggatgaaaacacagacttcacttatgtactttgtacatttggcctttaagcaacacaatccctatgatgtatgggtaaagtgcgtaaactgtttccgcttgcaacgtgataaagtacctaacagagaaagtatggatagtaattttcgttttatagtcaaaaaaggattgattgacacatacgatattcaactaaaaaccattgcagataactatcttagcactcaaaacaaaaacgccatcaacgcaaaggtggcaaacaacaatacttaaaataatgttttatgtcaaagaaattatctttgcacctctctctttttgaaaagagcgatgcgaggtttccaatggactcctgcgcagaccggtaaagaagggctattccggttggttgagcaagcccataagtcttacaaagacgaagtcaccacacagcaaaaaagttacaggcgatacgtgcttgactttacccattcacatcggtttcacgatgcgaatgatgcctggagcaagaatgaacatctaaagaattaccacacggtaatagagcttctggggaagcatgaaattttgattcgcaaacatttcgaccatgacctattggacgaaaatgggatcataaaacttctgaacgaattttacgccattgatctgtcggaatccactaccgagtccgacaacagcagtccggggaatcctattcagaccaatcagaataccaacatcaaacctttacttgacagacatactctggacctcattgtgcagcttgccaatgaggtctgtttgtttaaggaagttttggatgcagacaatgttgccatttgttatgcggcagacacattgcagactgtgacttcaagaaacaacagcaaattggttttattgttggacaaactggcttcacacgatgtgataacctataactggcaatcggtaattgcccaaaaacatcttgtcatcagttcttcaaggaagaaattactgacccaacacgatatgtcatcaaccctcaatcggataaaagacaccactcccaacgccatagataagcagtttttggcaatcatagacaagtatatcactctaatcaaaaacagagaagtataacaaaggaataacaaattgttgagagttgtattgagaattgtgttgatactcaacaatctcaacataatcaagcgaatatactcatctacctttgccctccgtaatcgattactcacggagggcatacctcccattgtcaaatttaacagcatcaatcaatgagacatcgaagaacgacaaatgaaaataagatgctctccaaaatggagaacatgatttcgatgatggcaacggagaaaccttttgaacggctccaatcgttagaacaaaagatcaacgaagtggataaaatccagaccatcgagaattacattgcacagttgaaagagcgtatttgggcagtcaaggaagtgctgactaccgctgaagcttctgcttatctcggtttgtccgagagttatatctacaaactcacttctctcaagcaaataccacactacaagccaaacggcaaattggtgtatttcaacagaaaggaactttgcgaatgggcaatgagaaatcaagtacaaacaatagggcaacctgctgctataacaagagaagaattatgaatagaaaagaaatagacttactactctcccgtatcgaaggattgaaatcattcctcgaaaacaactccttggaaaattttcagcaggaaatcctgaatgttgaaaattacctgaaacgattcggttctttggccgaactgctatcccatcttgaaaatgtggaaaagatagcttatgccgcaaaagagtttctcaatatagacgaggtagccgcctatctacaagtgtccaaaggctatgtctataagttaaccatgcagaaagaacttaccgtgtataagccgaatggaaaaaacatattcattctcagggatgacctgaaccgatggataaagcgcaacccctgtttctccaatacagaaatagaaaggcaagccaatatcatcgcttacacattgggacaaaaaagtaagaacaaaccaacaaaaggagggaaaaaataatgcaacctgatatgatacaacccaacaattatcggatagacgaagccaaatataagtctttattgaaatatatacggctgagtgttaccgaaaaatatgagtttccacaggaaatcgtacaaatagacggtgttaccattgccacaatcggaaatttcagtgcttccaccggcaaacccaaaagcaaaaagacattcaatgtcagtgctattgtcgcatcggctctttccggaaaggagattctaaagtacaaagcagaactgccatcttgcaagaatcgaatcctatacatcgacacagaacaaagcaagtgccattgccacaaagtgcttcatcgaatcctcaaactggcaggattgcctactgaccaggaaaatgacaacatccaattcttggttctgcgagaatacactcccgaccaaaggagagatattatacgatgggcactccacgaagagcaaaacatcgggctcgtaatcattgacggcatccgtgatttaatccatgacataaacagtcccagtgaatctcttgacataatcaatgaactgatgagatggtcaagctattacgaactgcatatccacaccgtcttacatctaaacaaaggggatgacaataccagagggcatatcggaacagaactgaacaataaggccgagactatcctgcaaatatcaaaaaacaatgaaaatggaaaaatcagcgaagtaagagccatgcacataagggacagggaatttacgcctttcgcatttgaaatcggagaagactctctcccacacctggtaaaagaacatcaattcaaaaagaacaaaatggacagactggcttcttatatagatatgaccgagcagcaacaccgaaccgccttggaagtaacctttgaagaatgcgcggaatatggctatcaatctttgcttgaagctcttaaaaagggatatgagagcattgggtattcaagaggaagaaacacattggtaaacttgtgtaagttcctgttggaaaatcatgccattacaaaaaacggtcgtacctactcctataacccttcattccacctctaaccggtatggtttagtttgtgggtatatataagtaaaccatactaaaatgaatatcaacgaagcaaaacagatacggcttgtggaatatctgcggataataggacattctccggtcaatgcgcgtggctgccagtattggtacctctccccattgcgagaggaacgtaccccctcgttcaaggtcaacgataatttgaacgaatggtacgactttgggctttctgccggaggtgacatcatagaactgggaaaacacctttatcgtactggcaatgtaagtgtggtattgctccgtatcagcgagaatgccattggcgtaccttttcaacagttacaaagccggagtgtccgcccctgtcctatcgaggaagaaatggaaaacgtggaagtaagagaactgagccaccatgccctgttgtcttacctccgttccaggtatatcagcgagaatatcggcaggctatattgcaaggaaattcattatgagctacgcaaaagacactatttcgccatagcctttgaaaacaagaccggcggttacgaggtgcgcaatccttattataaaggatgtataaaggggaaagacatatccgtcatcaggtataacaaggatataatccaaaaccatgtctgcgtgttcgagggctttatggacttcttgtcttaccaagaacttcatagaaaaggagactatcatgtctgcatcgacagtcctaccgattttcttgtgatgaactcagtcagtaatctgaaaaagtgtcttgtggaactggaacggtacaccgccatccattgctatctggataacgaccttgccgggcgaaaaacagtcgaaactattgccggactttgtggcaaccgtgtaactgaccattcggaatgttattataattacaaagacctcaatgactatctgagaggcaaaaggcgttagtctttgtattccctttgatagaaatatagtatccacgaaaggctctccgcacaggagggattttcgtggatatgtgtgtaagtaaacctggttatggatttttcctattatctatttggctataatctcccaatagccggtcttagtagaacctaccctcttaataacattcaattcctgaagctgcttcattgtttgggcgacccaccttcttgaataacctgtcagattagcaaggtctgtcatggttactttgggattgatttgtatttgttccaaaatttgtagtgcagtttttggtgcagtttgtagtgcagtttgtagtgcagtttgtagtgcagttttgagtgcacctcgccttgatgccttcacggaagcatctttgttggctatgtcggctattatatttccggcagcttcgtggcaaggaatcgtgatgcggaagaatgtgcggtcttcatccgtgacaacggttgcacgtggagagccattattctccaacacattttgtatggtcggaatacctgtagaacgcccttcggtcatgtccagttctttaagatattcacccaagcgacggttgcggtaacgttttgatacaagaatctcacaacgggaaatgtcagcggcagatatacttcgatccgggccacccacattttgaatggtaatactatccggctctactgttattacgacaggttcccattcccgatagtcacgatgataaagcgagttcgtgacactttcttctaatgcctgataaggataagtatagaatttcctactgcgatagtcattctccggtttgatgatactctgcatcacgagcatacgcttcaagtattccaaggtgcggtctataatctgcggaacagaacctgtgatgactgctccttcgtaaaggttactcggattattcagccttccttcagggaaatagacaatctccacctgtgtccgcttgaaaaatttgcttggattctcacagaacatcatggcagccacatttctcagcatacgtttttccttcggaccgacaaacaagtccatctgctccagaatctcttgcagtggtctgatgttaatctcgcttgccagtttgcttccgactttcaccaggtattcacgcaaaagcaaagtggatatgtcttccaaacgaatgtcagggttgcccctttcatcaaatggcacacgactggcaagttcgcgaagctcatccagcacctcacctttggcgataatgctgcttgttccactgcggatatagaagtattccttggaaccgttctttgccgttacattctccggaacagaatacggacggttaatcccggcagggcaccatattacgagtacagtcttgccgtccacttcctccgtgcttgtccgaggcatatagtacggggctatcttgttattatagccgaccatatcctgaaggatgtcatcaatctcttcaatgggtattccttcaacaggccgaatggcaactccggtcttgtcgtcagtgtcaacgcctaccacgatataaccgccaccaaggtcgtcaaaatcatttgcgaaagcgcatacgctgtggtatatgctcaccggattccaacctttcttaaattcaatccgattggattctatcctctgtttgttcagcaggtcgtctatgttgatagcaagtgccataattattcatccgcttaatggtaattgttctctgttcgtctttcaaaatatacatggcagttttgcgttttcgtcttttattaccacaaacaccttgaaaatctgttgcaaagttaatgattttgcacgagttgagcaaagaaacgggtgattggtttaatagtcattgatgaataagagactttcatctgatcttctttggaaaatacaagtaaagacattaagccgggcaaaccggacaacctgttcatctttcatcctcgtctcaatccggctcgtttttcggttcaaaattgcgcttaaagtatgataattgagtatgattttagattttctcagaataatgtttaatattcagccgcttttcgcaaggatatttcgtagtatgaaattattgtatttcctttgcgttcatattttaatcatattctaaaatcagactataagatatgaaagcatatttcatcttcgccattgcgctgaccgtggcatacatcatctactacgctgtgatgatagcaagagacctttatggtaaaaacgaagaaaagataaaatccggagaagaagaatttgacgtgagcgattttgacgaggaagaaagcgtcagcgtggtggagaacgacaagggattcaatatcggagataacgagtatgagacacactacatcgatgagacacagaatgtgtcggaggaaacaaatcccacagacgaaaagccgagacaggatgtcatcgaggctctgaacaacaaggtcaaggctaacatggaagagacacaggttaccttctccaatccttataactccgcagagctgtacaagctgatgattcaaaatggcattggagaattgcatccggacggaggtgtaaccaccaagaacgtaattgatgaactatgacccgacacaatggcaaaagaatactaagcgcactgtgtacgctgctcccttgttccgtcttcgctaaaagcggcggcgtgaactactcgtggggagcggacgcactggcttccatgcacgactatgtggtgacgatgatgctctatgtccagtatatcatttacgcggttgcaggaggttttgcggtcatagccgcattccagatatacatcaagatgaacacgggcgaggacggaataaccaagcacatactcacgctggtcggggcctgccttttcatcataggtgcaacaatagtcttcccggcatttttcggctatcgaatttagaaaatcacgagtgtaaaacaatcaataaagttcaattaaaacaagacaagtatgtttgaaaaagtaaaacgattcgcaaagaaaatcgcgacttcaaagaaaacgcagatgacctgcctgatggtaatgtgcggtgtgaccgctttgatggcacagactaccgcaggagactactcggccggaacagcggcactgacccaagtgagcgaggaaatcgccaagtatgttcctatcgtggtgaaactctgttacgccattgccggtgtggtagccgtagtgggtgcgatctcggtatatatcgcgatgaacaacgaggagcaggatgtcaagaagaaaatcatgatggtggtcggagcctgcatcttccttatcgcggcagcccaggcacttcctctgttcttcggactctcctaaaccgcaggtatcatgaacgggaaagaggaacactatccggattatccattgttcaaggggctgcaacgtccccttgaatttatgggtattcagggtcgctacatctattgggcggcagccacgataggcatcgccattgtcggcttcatcatagcctactgtatggcaggattcgtccttgccctgattgtcctgtccgtcaccgtgacaagcggtgtgggactgattctgttcaagcagcgcaagggattgcacagcaaacggctggaacgtggggtgttcatctatgcctactcaaagaaaatgtaacagaaaaccatttgaccatgaatggatatattgaatgttgaacgtgggtgggcttgacctttcaataggtcagcctgcccttaattgtaaacagccgaatgattatatatgttttcatagtcttcattgccctttgcgtgggcatggccgtgtcggtctatgcctttggaactggcggcaagcggaaacgcatctttcaggacatctatttctccgtggaagaagcggacgggattggtgtgatatataccaagaccggagagtattccgccgtgctgaaactggagaacccggtacagaagtattgcgccaatatcgactcttactatgagttcacgcaacttttcaccgccattgcccagactttgggagaaggctatgccatacacaagcaggatatttttatccggaagaatttcacggaagagagtgacgagaaccgtgaatttctctccacatcctatttccgttacttcaacggaagaccttataccgacagcgaatgttacctgactatcactcaggaagtcaagaaaagccgtctgttttcttttgacggcaagaagtggcgagacttccttgtaaagatacgcaaggttcacgaccaactgcgtgatgccggcgtacaggtgagattcctgaacaggcaggaagtcaatgaatatgttgaccgctatttcgccatgaacttccgtgacaaggtagtctcgatgactaacttcaaggtgaatgatgaatgtatctccatgggagacaaacggtgcaaggtgtatagccttgtggatgtggataacgtgagcctgccgtctgtcatccatccctacaccaacgtggaagtcaacaacagcagtatgccgatggatctggtgtcggttgtgtccggcattcccaataccgaagcggtggtgtataaccagatgatattcattcccaaccaaaagagagaactggccttgcttgacaaaaagaagaaccgccatgcgagtatgcccaatcccggtaatcaaatggcggtagaagacatcaagcgtgtgcaggaggtggtggcaagggaaagcaagcaactggtctatacgcactacaatcttgtagtagccatgtccgcggacaccgacctccacaaatgcaccaaccatctggaaaaccagttttcaaggatgggcatccatatttccaaaagagcctacaaccagttggagctgttcgtcaactcctttccgggcaactgttacggtatgaatcccgactatgaccgtttccttaccttgggtgatgcggcagcctgtctgatgtacaaggaacgcatcctgcatagcgagaaaactcctttgaagatatattacacggacaggcaaggcgtgcctgtggctatcgacatcacaggaaaagagggcgcggagaaattgaccgacaacagtaattttttctgtctgggtccaagtggcagcggcaaatccttccacatgaacagcgttgtgcgccagcttcacgagcaagggacggacgtggtaatggtagataccggtaactcatacgagggattgtgcgagtatttgggtggaaaatatatatcttacacggaggaatgcccgattacgatgaaccctttccgcatcaacaggcaggaattgaacgtggaaaagacaggcttcctgaaaaatctcgtgctgctgatttggaaaggcagccaagggacggtcaccaaaacggaagacaggctgatcgagcaggtcatcaccgaatattacgatacctacttcaacggtttcgatggtttcaccccaccccaacgggaggatttgcgcaaaagccttttgattgacgaacgaaacaaaagcggcaatcgcgctgaaagtgaaacggaactgaacgcacggatagaaactgtcatagacgagatagaacgcaggagaaaggaactgaaagtggaatcactgtcattcaacacattctatgagttctccgtacaacgcattcccgacatctgcaatgaaaacagtataaccgggatagacatttccacctaccggtatatgatgaaagatttctatcgaggtggcaaccacgacaagacgctgaacgaaaacatggacagttcgctgtttgatgagaccttcattgtctttgaaatcgattccataaaagatgacccgctcctgttccccttggtgacactcatcatcatggacgtgttcctgcaaaagatgcgtatcaagaagaaccgcaaagtcctggtcattgaggaggcatggaaagccatagccagccctcttatggcagaatacatcaaattcatgtataagaccgcccgaaagttctgggcttcagtgggcgtggtcacacaagagattcaggacatcatcgggtctgagattgtaaaggaggctatcatcaacaactccgatgtggtaatgctgcttgaccaaagcaagttccgtgaacgctttgataccatcaaggctattctcggtctgacagacgtggactgcaagaaaatctttaccatcaaccggctggagaataaagaggggcgttcgttctttcgtgaggtctttatccgccgtggcactaccagcggtgtgtatggtgtggaggaaccgcatgagtgttacatgacctataccacggaacgggccgagaaagaagccttgaaactctacaaggctgaactgcaatgcagccacaaggaagccatcgagcgttattgcgctgactgggatgcttccggaataagcaagtccctgccgtttgcccaaaaagtgaatgctgccgggaaggtattgaatcttcatcaaccaaagacaaaacaacaatgaaacgattcgctctcataataatgacaatagccacgattttcgcccaacaagttcatgcccagtattacagcgtgaacttcgatgcgaaaaccgttgccgctatggttgccgcctacggtactggaaccgttgcagaagcgtattatgacgagcaggtgcagaatatactgaaacactacaaggcttcggaagtggccactgccggaatatttgccagcaagttcctggagaggaaggcactcactgatttgggcatctggagcagtgccaccgaaaattactactaccgcaggatttatcacttggtggcgcacaagattatcccgaagacatggattgtcgccaagctgatgctccgttctccacaaaccgcactccattggtgcagttatctgatgaaagtgtgcgatgacaccaaatccctctgtatgcagttcgagagcgttgtcaccaacagcacactgtctttctccgatatcgcctttctggaaatcaatgaggaaatcgcctccatcttaaaactttccgagattggcaacgtggactggcaacggctctttgatgacatatccaaaataccgggcaacttcaccaaggaaaacctgaaagccgatttggacaaactttaccggatgggagccggtcttgccacttcgggaatcaccaatatcgggaacgccttgttgcaacagaactcgtttcacgagctgatgaacgggaaggtcagcaaggtcattgacatctacgagcattacaacggacttttcgagcaactggagaacaatgccggacagaccatactgggtatcgtgggtagtgaagaaaatgtggcaggattgttcaagttcagcgactacaacctcacttcgtggattaccgattatttggacgaaacagccgggaattactacacccagcgatggtacatcgcgaggcgtgaccgtggcagtgtctccctctgcgactattatcccccgacagatgacaagagcatccttgaaggtggtgaatggacccgcttcaagacaagctatccgaacttctatcccaacgcatcgcaaaaggaacaggccctttccaattcggaacgctacgccggatggtcaaggaacagagtgcaacagcttaacaacgccaatgacggcttcagttacaccatcaattattaccagtccagctatatcattaaaaaaggaaagaagcagaccaagaaggcatacgcctacgaaatccatgtcacgaaaagctggaacaacgaggaaatagtctatgaagacgtgttcgattcctattcgatggatttgaacacattcaaggcacaacttaatgcacatctgtctgagtttaacgacaacgaagacggctatgtctattatatcgcttccgacagccggaactattaccaggcaaccaatgaagagaaactgaaaggatgcgaaacggtaacaatcagtgtcacctgttcggacggtgcgacacttgggcagggaacaacccagtacaagtgccggaaatgcggaagtacgctcaacgcacattccaaagagtgcgcgatgaagactacagctgaaagcgaggaactggatttgtctgaactcgatgccatgcagcgggaagcggacaacaaggtttacgcgctccagtcacaaatatccgcattggaaacggaaaacgaatcgcttatcaaacagattgccaatgccagtgtggaggatgccgttcctctccgtcagaaatacaatgagaacaaagcggagatagacaggttgaaacctgaacttgccgcctggcagcagaagcaagaggaaatcgcacaggcaaaagaagaagccaaaagcgacaacgatgtgcagaccgatgactattaccggataccggctatcatgcaagactgcaagacggcttacaatatcacctggcaggacaacggttcctggaacggctacacctatgtccgaaaaggcacaatcccgaatatcaacggcatcatcacattcaaggcgacactgaaaatcgcccgaaagcccaaatacttccttggcatcaagatacacagggctatcctgcaaatctcctgggacttggcaacggagtattcggatacccatgtggtggaagtgattacgcttgaccccgatatgagcgacaaggaaaagacaaaactggtcaatgaccgcatagcggaaatcgcgaaagaatatccgaagtgcaagataacgactgaatacgcccgtactgcaccgcaggaggacacgaaaacaaacgatatgtatcacctgctttggtcaagcgaccggctggagatagcccgtgaagtggattcccggctcacgaagatttacgccgacttggtatcattggaaaagatgatgcactacaggcgcagtatcattgacgtgctgaaagatgttctgccacccgttgacgatgatcaggggcgcagactttcccttgtggaggaatgtcacgaccgttggatggaaaacgcacgaaacagaaagactaaggagggcaagcgatgaaaagaggcaggacatatatactcggactgttgataatgctgctggcacccctgtccgcaaatgcgcaatggagttttgatgtggggacggttgaagcctatatcaatgaccacaagcaacagcgaagcctcttgctggctcgctccaccttggaacacagcaataaactgttgcatgagtacagccgcaaggaaatggtgggttataaggaactgaacgtggatctggacaagtacaccagagctttcgatgtaattgacgtgatgtaccagtccctgcgcacggcattgaatgtacattccacctacaaaggggtcagcgaaagaatatccgactacaaggcgatgcttgaagatttcagtgagaaggtcatcaagcgaaagcacatagagttggcggacacgctgatattatccatcaatgccggagccatacggatgatagcccaggaaggagaatacctatataaatccgtgagcgatttggttctgtacgccacaggtgcggcggcctgttccacttcggacttgctgatggtgctgaacagcatcaactgttctcttgacaatatcgagaagcatttgaaccgtgcctatttcgagacctggcggtacatacaggttcgtatcggctattggaaagagaaagtctatcgtaccaaaaccaaacgggaacttattgacgatgctttcggacggtggagacaatcaggtaaacaggattattgataactaaaaatagagaaattatgaaatggatttttacaacgatgctgttcgtggcaaccattgcggcaaacgcccaatatgtcacctacaaccacgattcgcccaagatgaaccaaatcacggtggaagaaaccggagccggtgcgctcaaaccggaactttattacacgttgctgcacaacaaatacaagaaaacggcagcggtcaagaacaaactcacattccgcacggcggcaggcgtggcttcctatcagcaggtagatgaagcggaagccatagattccgcactcacaagcagagccaagattgaagccttgaatgtggcagaccgacaagtggatctggcctggcttgcggaaaaggacaagatagaatcccagatgcggcagtttcagaagaacattgaccgcataatgatgacaggcggctcgccaaaagaaaaagaacggtggaacgactattaccgtgtctatcaatgcgcaatcaaggcaacaagggatgcctatatgcccaatgcgcagcgtaagaaagagtatctgcaaatctatgccgatgtctcccggcaaaacgatgtactggtgaaatatctcgtccagttgagcaaccgcaatgccacgaagaatctcctttcggcaacggagaaccgccagatagacaaaagaagcattatcagcaatgccatgagtcgctggaacgaatcccggtcagcagtgcgagggtcgcagaatgatgacggaagcgaagacggagacggtaatgagagtgtgaacagataaaattaaatggaaaaatagatggcaagcggagatatactttcagatttcggcatcaatctgcttgaagaagagattgatgatgtgatttttcagaccaacgagttcctgacggatgccaccttcacaggttcacaaggcccgttttggtggattctccagatgtgtatggcactcgcggccttgtttgcaatcgtcatggcagcaggtatggcgtacaagatgatggtcaagaatgaaccgctggatatcatgaagttgttcaagccattggcaatttcaattatcctatgctggtggtatcctccggctgacacgggtatggtaaacagcggaagcaactggtgtgtgttggatttcctatcctatatcccaaactgtatcggctcttacactcatgacctgtaccaggcagaagccacacagatagaggataaatttcaggaggtgcagcaactcatctatgcaagagatacgatgtacaccagcctgcaagcacaggcggatgtggcacacagcggaacttccgaccctaatctgatagaagccactatggaacagaccggggtggacgaagtgaccaatatggaaaaggatgcagccaaactttggttcacttcacttacttccgggattgttgtaggaatagataaaatcgtgatgctcatagctttaattgtatttcgcataggctggtgggcgacgatttactgccagcaaatcctgctcggaatgctcacgattttcggaccgatacaatgggctttcagcctcttgcccaaatgggaaggagcttgggccaaatggctgacaaggtatctgacggtacatttttatggtgcgatgctctacttcgtcggattttatgtcctgcttctgttcgacattgtgctttgcatacaggtggaaaacctgacggcaatcacggtaagtgagcagacaatggctgcttatctgcaaaactcctttttctcggcaggctaccttatggctgcaagtatcgtggcattgaaatgcctgaaccttgttccggacttggcggcatggatgattccagaaggcgacacggcattctcaacccgaaacttcggtgaaggtgtggctcaacaggcgaaaatgacagcgaccggtgcaatcggcaccatgatgcgataatcgtaaactcataatcaagaatatacaatggtaatcagaaatttagaaaacaaaatcaagttagtgggaatcatctgctcgttcttccttgtcggctgcatcatcatcagcgtaagcagcatttggacggcacggacaatggtgacagatgcacagaagaaagtctatgtgctggacggcaacgtgccaatattggtcaaccgtaccacgatggacgaaacccttgatgtggaagccaaaagtcatgtggaaatgttccaccacttctttttcacgcttcctcccgatgacaagtacatcaaatacacgatggaaaaggcgatgtacctggtggacgagaccggacttgcacagtacaacacgctcaaagagaaaggcttttactccaacatcttgggaacgagtgccgtattctccatttactgcgacagtgtgcggtttgacaaaagcaatatggagttcacttattacggacggcagcgtatcgagcgcagaagcaatatcctgatgcgtgaactggtgacggcagggcaacttaaacgagtaccgagaaccgagaacaatccgcacggactgcttatcgtaaattggcgtaccctcctcaataaagacatcgaacagaaaacgaaagcaacctattaaaatttacagatatgaacaccaaaggattccgcaggatgctgttcggcgaaaagatgccggacaagaacgatccacaatacaaagagagatacgagcgtgatgtgaatgccggtcgcaaattcgcccaggcgacacgtcttgacaaactggccgccaagatacagggctttgccaacaggaacaagatactgttccttgtcatggtattcggtttcgtaatcggcacattcaccttcaacatttatcggctgaccaaagcttatcggcatggtcaggagataagaagtgctacagaaatgcaggacagcctgctcagagaacgccacaaggagccggttgctcccattgttgaacccacccaaaccagacaacaatgaaaaggatattcgagaaaatcaatttcaggcagcccaaatatatgcttcctgccatattgtatattccgctgttgggcgcgtcctatttcatctttgacctcttcaatgcagaaaaggcagagatagccgacaagacactccagaccacggagttcctgaatcccgacctgcccgatgccaccatcaagggcggcgacggcataggaagcaaatacgagaacatggcaaagtcgtggggcaagattgccgactacacggctgtggataacatagaacgagacgaacccgatgatgacaaggaaaaatacgaatcacagtacagccaggacgaagttgccttcttgggtgaactggaacagcagaaattacaggcagaggacgctgccgatgccaaagcgagagagcaggaagccctcaaagaactggagcgtgccctcgcggaagcacgactaaaggcgcaggcacaggtggaacctgttgaaccgcttgcagaagacagtctcgaacaacgcacggaaaccggagtgtccgcaagcggaacaatcaatgaagacagccgggcggtaaacgctccttccgaaaacgaagaaccgggtgaaatgatcaagaaagtaaaagtgacctccgactatttcaacaccattgcccaaaacgagcatgagcctaatctgatcaaggcgattatagacgaggatgtcaaggccgtgaacggaagccgtgtcaggcttcggcttttggatgatgtggaaatcaatgagacggtggtcaaaagcggttcttatctctatgccatcatgagcggtttttcctcgcagcgggtcaagggaaccattaacagcgtactggtgaatgatgaaatcatcaaggtcagcctttcgctctatgataccgacggactggagggactgtatgtgccgtcaagttcattcagggaaaccgccaaagatgtggcaagcggagcgttcaacagcaacatgaacatgaataccggcagtaatggcaacagccttacccaatggggaatgcaggctattcaggatgcctaccagaagacgagcaacgccatcagcaagaacatcaaaaagaacaaggtcaacctgaaatacggtacgtttgtctatatcatcaacagcaaggaaaaaagaaatgcaaagtaaataaccattcaaagaatcatagatatgaagattatcaagactatctgtatcggagtaacggcggcattgtcgagcctgcctacattcgcccagcagacttacgaggaactggagcaactgaccgtcaacgagcaagtgaccacggtcattaccgcttccgaacctatacgcttcgtggatatttccacggacaaagtagtcggtgaccaaccgataaacaacacgatccgtctgaaaccaaaggagacgggatacgaggacggtgagatactggccatcgtcaccattgtcacggaacgctatcgtacccagtatgcgttgctctataccacaaggatgcaggaagccgtgacggacaaggaaatcgagttccgggaacgtaacgcctataacaatcctgccgtgagtatgtcacaggcggatatgacacagtttgcgaggcgtatatggaactctcctgccaaataccgcaacgtgagaagccgggaacaccgcatgacgatgagattgaacaacatctacgcggtcggtgattattttttcattgacttctccattgagaacaagacaaacatccgttttgacattgacgagatccgggtaaaactcgcggacaagaagttgtccaaggcgaccaacgcccaaatcatagagctggctcccgcattggtacttgaacaggcaaagtcattccgtcatggctaccgcaatgtcatcgtgttgaagaagatgaccttccccaacgacaaggtactgaccattgaaatgaccgagaaacagataagcggcaggaacatacatctgaatatagactacgaggatgtgctttcagccgattcgtttaaccgtgtattattggaggaggaatgatgaaaaagatattattggtattggtcacggtaatgacatttgccatgaacggtaaagcgcaaagcaacagcgaccgtctttcgttgggtgtcggttgcctgtatcaaaacgggctggacatcaccctctcatacgaacatgagggcaagtaccaccacacatgggagttttttgccaatggttatctcaaatgggacgaatgcgcatcctgcggtcatatctgtccggaatcattctggaggaattacaggagttacggattcggagtagcctacaagccttgtgtggcgcgtggtcgcaaccattacggcaatgtccgtatcggggcatcggccgggagtgacacaaaacggttcttgggcggcatccacctcggctatgaacacaattacgtacttcgaggtggctggagacttttctgccaggtgaaaaccgatttgatgataaaaggagaagacctgttccgcacgggcattgtcttaggtgtaaaattacctctaaactaagggaaaatgaaaaagaaattatacataaacgcttgcaggctattcagtctgtcggccatcgtcatgttattcgtggcctgtgacgcacaccgggatttcccggacacggcaatgaagccctgtcatatcctgtgtacggacggcaaagtgttgtcggtatcagacttcaagcaatccgaaaaacagcccattgccgtggtgttccatgtcaatcacgatgaagccattgaaggcaacggctatgcggtttacctgtgggacttggctccggaggcttttgcagatagcataggggtaaaccaacgcacatctactgacatcacggcactggacggcaacgaaaacacctttgcaatctacgacaccagagaaaccacctcgcctatggcagaagcagtcttcgccctgtggcggtacggacagtcgtcctatatcccatccgtggcacagatgcggatgctctataatgccaagagccagataaaccccatcatcaggatgtgcggtggcgacgaactgcccgatgcagccgatgactgctggtactggacgagtacggaagtggccgggcaggaaaaggcgaaagcgtggctctattccatgggaagcggctcgatgcaggaaacacccaagacacaggcgcacaaggtacgagcaatcattaccttgagagattaagaatcagaatatacaagaattagcgaataactggaaacgaaatggaagaaagcaaagagttacaaggtttttacaagatattccgttcgatcatctatgtctccattctgctggagtttttcgagtatgccattgacccggccatgcttgaccattggggcggcatactctgcgacatacacgggcgtatcaagcggtgggtaatctacaatgacgggaatctcgcgtatagcaagttagccacattcctgcttatatgcatcacctgtatagggacaaggaacaagaagaaactggagttcaatgcacggaaacaagttctttatcctattataataggtatggggctggttgtattgtctgtttggttgttcggatatccgatggaaacaaggctttacactttacggttgaacatctggctttatatgcttgcctcaataatcggtgtggtactggtacacattgcccttgacaacatttccaagttcctcaaagagggattactgaaagaccgtttcaattttgagaatgagagttttgagcagtgccgggagttgcaggagaacaagtattcggtcaatatccccatgcgctactattacaaggggaagttccgcaaaggttgggtgaacatcagcaatcctttccgaggcacatgggtggtcggcacaccgggttccggcaagactttctccattatcgaaccgtttatccggcaacactcggcaaaaggctttgccttagtcgtttacgattataagtttccgaccttggctaccaaattatactatcattacaagaaaaaccagaagctcggaaatctgcccaaggggtgcaagttcaacatcatcaatttcgttgatgtggagtattcgaggagggtgaaccctatccagttgaaatacatcaacaaccttgctgccgcatctgaaaccgcagaaaccctgcttgagtccttacaaaaaggcaagaaagaaggaggcggtggcagtgaccagttctttcagacatccgctgtcaacttccttgcagcctgcatctatttcttctgcaactggggcaaagagccatacgacaaggacggcaatatgctcacggcagagaaggtacaggacaaacagaccaaacggatgatacccaccggacgggtgttcaattccgcaggcgaggaagtggaaccggcttattggctcggaaagtattccgatatgccacatatcctgtcattcctcaatgagagttaccagaccattttcgaggtgttggagaccgacaacgaggtgacgccgttgctcggtccgtttcaaaccgctttgaagaacaaggcaatggaacagttggaaggtatgattggtacgctacgtgtctatacctcacgccttgccaccaaggaaagttactggatattccacaaggacggtgacgacttcgacttgaaagtttctgacccgaaaagtccttcttatctcttgattgccaatgacccggaaatggagagcatcatcggtgcgctgaacgcccttatcctcaatcgtctggttacacgagtgaacacgggacaaggcaaaaatatcccggtaagcatcatcgttgatgagctgccgactttgtattttcacaagatagaccgccttatcggtacggctcgaagcaacaaggtgtcagtggcgttgggattccaggaacttccgcagctcgaagcggattatggcaaggtaggtatgcagaagattatcaccactgtcggcaatgtggtcagcggttctgcccgttccaaagagaccttggaatggctgtcttccgacatcttcggcaaggtggtacaactcaaaaagggcgtgaccatcgaccgggacaaaaccagcatcaacctcaatgagaacatggacagtcttgttcctgcatccaaaatctccgatatgccgaccggatggatatgcggtcagacagcccgtgattttgtgaagacaaaaacaggaagcggtggaagcatgaacattcaggaaagcgaggagttcaagacctccaagttttactgcaagacagacttcgacatgaaagaaataaaaaaggaagaagccggctatgtaccgcttcccaagttctacaccttcaaatcaagggatgaacgggaacgcatcctttacaagaacttcgtacaggttggagaagatgtcaaggaaatgatacaagagattcagaaatataaagtgaaatagcttttctaatgggggcaaatcatcaggcattgcccccatattccaaccccaataatgctttatttttttctattttgagttttcttgattttaggcctcgttccattttttgatacgccagtgtcaatacaactactacatttacaatctgttagcaatactaaggtatgtggtaaatcagtgtattcatttttcaaatcatcaaaattagaacaattaccaccttttttatgaacatcaaatatccaaaatacagacaagcaagcacctgttgcattagtgtattgtatgaactttttcttatactcctgacgttcttttttatttttaagttctttattgtgaagcagtttaagctctaccataataggattacataaaccatatcgaataagaagatctgtacgcttattatcttgtagagtaacctcccgatctacacgaacagcctctaatcccatttggcagcatttattgatgacggtatttttcaactccctctgaataaaatcttcacttaaagcctcttgtcgtactaaagaatatataccttggtcttgtatttctttttgaacctcagaataaatataattaaaatatcgtcttaaatcgttatcgttccggatttccaaatgtgattctttgacgcatttattgtattgcttaatagctttaccaattgtaattttttcttttttcaaatacattatttcagcattatccataatgttgtttacgagaaaactcgcatttgtatcattaaaatacgccaccttttttcttaattctaatatataaaaaatattattggtatttataaagaaaaagcatatctgattaagaagatagcttgagtattcctgtgtctctgaagttatacataatgataagccaaaatcaaacaaatcaaacatttgttcaatcagtctctcattattttttatgctcataaagcatttgaacatctgtggatgtgtcatttctgattcttccttagaaaccgcatatacatacccagttttacgacaaagagactttacaacatgattttttaaatattcaatcctccatgtcattgcctctggatcttgatatttttcaatcattatgtcattacactgcatttttatgcttccaatactatcatcagcaagagaatcgaacaatgctctgtaattatttatattccaattacagtacccttcagatacaagagctaaagctttagatgcagcaatactgtgactaaagtcttgattggctttatattgttcgatatactcttccactttataggacaaagcatcaattccataatcggtaatacaggttaaaacatcctccgtactaatattcataaaatcatcttcccttgacttccaccattcgacaagttgcttcttctcatcatcactaatactacaaataatagacttgtatatttcctttatctcgttggccccagcattcaaagtacagcagacaacaggtaaagtctttatcaaaacagttctattttcttccaacactttacggaatcctaaccgataaattgcattaacaaaatacggtattttaattaaagatgtagatagattaaaagaattttcggatgtcttctttaatgtcatttcatccaaatttagttctgtgaaaaattttgcaataacatccacaaaaggttgaataaattcctgttgttgtataaattctacatttttagatacttcaaatgcagcttcatacttgtagaattcgtgtacatttagttttgaaaggatttgataagaatcaataagtcgctgatattcatgtgaatttgtttgactttctacttttttctttgagttttcatcccatcgttcaaatgtctctgcataacgttttatgtattcggatatagaaatgctcttaacttcatcatttctgattttactaataagagcagttagaatattgtctatatgccattctcctatctttatttcatgtaaaagtttgtctaaagaagatataagttcagcatcaacaatttctgcatcaaaatgtcgaaataaatcttctaaatcccatactctatcaaaactatcaataaacaaggatcctgttgttttctcaagcagtatttgtttaataataggattgatctctgtatagctcatatacagatgattattaatgaaactcacaataacttttgtcatgagttttttactttctaaatctatatcccacgcaatatgaaattgtttcgttaaatgccactcataatggatatgtaaagtcctattatgattaaaaaaatcaccaagtttattagcttctgtaatcttattatacgcataaataattgtaggaccatccattataaatagtactgcatttattgcatatgaatcacttgcatagcaactatccaaccagcaatctacaacattattatttgtaaattttccatagccggtcacttcacagtatttttctttcactctttcagtaaaacgactgtatgaaccagataatttgacaagttcgtcttcattttttagtgcattatacaaacttaaagccaccagttgtttttcctcatcgcctgtttgcatgagaatatttgctgcattattccaatggtcgaaaacttctttgctcagtttgtcatcttcggcaattacttccaatatagtacagatattcgttatttgaatcttattaagccgttctacagccaatattattttattattacaacttgaagtatagcattcttgtaataatccgcaaattgcccctctccagttaatatatacaggtacacgttgatagtggtcaaaaatgatgaagaataactcttctttctgttgaagagaaagaagagaagaatctatatatttcagcaaagtttcaaatggctcattttcaagattagattcatatgccacaataagttttagcacattaacaaatgtatgtattttatcttccgcatatgaaatatgaggaataacatcgtaccagtttatgtaaatacgtttcaattctttatgcacagcaacatcataaagtacactttcaatattgtcctgcctacataattctttagcagcaagatattcctgtagttcagtattttcaaattgcaatatcccatttgtttcttttaatatacgactctcaaagaataacaaatcaaaattagcaataagcatctgtgtcatattgccttctacttcatctaagaccgtatataattcatcttttgaaatttgatcctttctgcttatttccataatgaaagccactttttccaatactcgttgtataagaactttaacactttcattattcgtagtgttcggataaacatctatggctgtttgtattgaacggacaatcatatactcaaaaagttctccgacatttaaacatcctccttttttctcatcatactccaataaaaatgtcaaatatctaggaactgttagaagctcttttaactttgcgcttttactgatattttcgtttgttatattcgaacatctacaattaacaacatcacttacaatatgctcactcaacctgcataattcaataaaaattaaatcactgcaaactgagaaatgctttttataagatgccacataatgctttctacaagtaaatagcacctttgtttcgggattattttccctatattgtcttattgaaagtaaaacagtatggaatatatttccctcaacctcgtccaaggcatctattatgcagaaatcctcattggtcggagcggattctaaattaaatttagatgcaggacataaatacaaatgaccagaaatttgcttctttatttcatcaacaagccgactctttccaataccaggttcacccactatacaaacaaatttttcttgaagcaatttgtctattgacaaattttcttcgacaccaaacaacgaagtggttctgttattctctaacagatcatacacattttgatacctgactatttgaggtgtaatataattttccattctttatgtaccagtcttatcataaaataactatagagcaaagataaccctttttcctgatctaataatcatagataagcaggaatattgaactaattcgcaatttcaatggaaaatcatataacttgaatgatgtctgaataaaataaattcattacttttgcatggtaaggtaaataataaaccaaaatggaagagacgaaagatataaatcgaatcaaagtcgttcttgttgaaaagaagcgaaccaacaaatggctggcagaacaattgggcaaggatccggcaacagtgtctaaatggtgcacgaacacctcacagcccggattggaaactctgttgcagattgccaatgtgctgaatgttgatgtgaaagagttgttgaactcctcgttggaggaaagcatccagactgtcagactcgttaaatgataatacgtggatatgaacaaaacggaattatacaataagatagtgcagctcgatggactgacaaacgaagaaaagtcggaactgttgggcctgctgcgcaagcaaaagaagtatgggcttgtgtgggaggataagccggaggatgtggaggagcgtttgcgggatgagttgccggtattgatagaggatgccatgaaagccataatcagcgatgatgccaatgcaccgaaccatatccttatcgagggtgataacttggaagccctgacctcacttgcctacacgcatgagggaaagattgatgttatctatatcgatccaccgtacaatacgggaaacaaggattttgtctataacgactgtattgttgacaaggaagacagctaccgtcattccaaatggctgtcgtttatgaacaagcggttgcgtattgcaaaacaactgctgtctgaccgtggcgttatctttatctcaattgatgataacgaacaagcgcaattgaaattgctgtgtgatgaagtgttcggaaataataattttataaccaatattatatggcagtcaacagcaggctctaatacagggaatgaaattgtaacaacaacagaatatgttttagtctatactgcaaatcgttcaaaagctcattttgacggacagccaccttcagatgatacatttaaactaacggatgaacatatcaaagagagaggacattatactttggataaacttgatcgaagacgagtagggggacattattcagaagcacttaattttccaattaaaatgccagatggaactttacgatacccgggtggaggacaacaacagaatgaaggatggaactatttatggagtaaaacaaaagttcaatgggggttagataatgattttatcgtttttaagaaaaacaaaaatgaatgggcagtatattgtaagcgttaccaaaaagtagataactctaacagacaggtagataggacaacaccttataggaatctaatcacatcagatttgttcaacacagcccaaggtacagcagaaatagctaatatttttgctattagaccttttgcttttccaaagccatcaacctttgtgaaattcttactatcctcagcagttgtaacatcacctaacgctatggttcttgacttctttgccggctccggtaccacccttcacgccactatgcaactcaatgctgaagatggcgggcaccgcaagtgcatcctcgtcaccaacaatgagaataacatctgcgaagaagtgacctacgaacgaaacaaacgggtaatcaatggctacaccacacctaaaggtgaagaagtcaccggcttaaagaacaacacactgcgctactatcgtacaagttttgtcggcagaagccggagcatgaagaatatgcgtcaactgatgaacctctccaccgatatgctctgcattaaggaagacctctataccgaacagacaaaattcggtgaacaaccgacctacaagaatgtgttccgctatttcgacaatggcaagaagcgtatgatgattatatataaggaagaggccgtgccgctgttggcagaccttatccgaaagactgattacgaggggaagatgcgcgtgtatgtgttctcgccaagcgaagacccgtgggaaggtgaatttgaagaggtacaggacaaagtgcagctttgcgctcttccgcaggccatatacaacgcctacaagcgcatcctgccaaagaaaaaagacatcactcttgaacaagaaaacgatgctgccagcaatgacgacaaagcattcaacggtatgcttaattttgatgaaaaggaggacgagcaatgaacgagcagcaggataaaggaaacatcatactctaccaaaccccagatgggcaatcgaagatagaagtaaccctgtcgggcgatacggtgtggctcactgccgaccaaatggcagaactgtttcagagaaataagtccaccatctcacggcacataaaaaacgtgtttgaagagggtgagttgcaggcagatatggttgttgcgttttttgcaacaaccactcaacacggagctatcataggtaagcaacaaacgcatcaaacagccttttacaaccttgacatgataatcagcataggctatcgtgtaaagtcacatcgtggcgtccagtttcgtatatgggctacaaatgtactgcgcgaatatatcgtgaaaggatttgccctgaacgatgaactgctgaaacgtgccggaggtggcaactattttgacgaattgcttgcacgtattcgcgacatccgctcatccgaaaaagtgttctaccgaaaggttttggcaatctatgcgttaagcatagactatgacccacgggcagaagccacacaactctttttcaagaccgtacagaacaagatgcacttttccgctcacggacacactgccgctgaagtaatatatgaacgtgccgatgcagaaaaggatttcatgggattgacctcgtggacaggcgcaatgcctaaacgtactgatgcagaggtagcgaaaaactatctttcggctgatgaattggatacgctcaatagaatagtcagcctataccttgattttgctgaactgcaagccaagtcgcaccagcccatgtatatgaaagactggattcagaagttggacgactttctcaaactatccgggaaagaactacttacccatgctggcagaatatcggcagaaatagccaaacagaaagccgatatggaatatgataagtttaaggaacggaccatgtatgaactatcgcctgtggaaattcatttcttggagaattttgaaaaggaacagaaaaaattaaaggaatagacggaaaacaatgaagaatttagcatatcaacagaaagccgtaaccgaattggtagataaaactatccgcctgttaaaccttggagggcagcgcaataaattagtgttcgaggcgactaccggagccggaaagaccgtgatggcttgccagatgctggcaggactgatggacgaattgcacgaccgtggtgacagccgttaccaggaagtggcatttatatggtttgccccacgcaaactgcacatacagagttatgaaaaattgaaaggcgcattcgaggagacacgcacgcttcgcccggtaatgttcgatgaactggaccagaatgaaggtatccgtcccggtgaaatactctttgtaaactgggaaagcgtgaataaggagaataatgtaatggtacgtgagggtgattgttcactttcgctttacgaaataaccgacaggacgaaagaggaattcggcctacctattgtagccatcattgatgaggaacacatgttctggtcgaagacagcggacaagtcggctgccgtgctcgatagaatcaatccgactgtggagattcgtatttctgccactcccaaaactgccaatccaaaggaaaaggtcacggtctatcgtcaggatgtgattgctgcagaaatgataaaaaaggaagtggtgctcaatccggaaatagagctgaatttcagtgatgaactggaactcaatgccaaccttatcaaagcggcattggacaagcgtaaccagatagccgaagcgtataaagcggtaggttccaacgtcaatcccctgctgttgattcagttgcctaacgacaccaaagagagtatgacagccgaagatacagccatcgccgaccaagtaaagaaatatcttgaagtgatgtgtggcatcacaacagacaatcatcggctggcagtatggcttgccggcgagaaagagaatctgacagaccttgaaaagccggataacctgacagaggtattgcttttcaaagaggcgattgccttgggttgggactgccctcgcgcagcggtattgctcatcttccgcaaattgcaaagcgaccagtttaccatacagacagtggggcgtatcatgcgtatgccggagcagaaacattatcaaaaggagatactgaactccggctatgtgtttaccgacatcgcaaaggacaagatacagattgttacggcggatgccggatatatcttgaacaataccattaccgcgcatcgccgtgagaatctgaaaaatgtaaacttaccgtcaagctatacagaacgccccaatgtagaacgtaactatttaggcccggacttccgtaaggtgttacacgaagaagcccgcaggttttgggactttgtggaaggcaacttgctgttctcgttggaggagttggccaagttggataatgatgaagaaagcaatacattgccggatagcgatgaccttcaaatcaatgaaaacaggaaaaaggtggctaactccttgcgccttgatgtaaagaacatcaatatcgagataccgcaagatgtacacttccaaaatgaagaacaggtgctggaagttgatactgtaaaatacgcgagaaaagccacggagatagaccgtgtgtttatggcatacattgccactaaaggccatcagttcgagagcaaaggaagaactgacaaaatagcaagttacctgttagagatacttgccgatttctttggaatctatgagacggaagccaaaaaagtggtactctaccattcgaaccgccccaaattcgaccgtatcatcgactccgctttggaaaggtatgcccgtatccgtgacaaggcccgcaaagaatcggcagcaaaaagagtattcaggaaatacggctgggaagtgccggaagaacggacatacgataacgaaacaagtcacatagaagaaaccggtaatcatgcgctactgccatttgtgcaactcaatcaggcttcgaatccggaaaaagattttgttgcctatttagaacagaacagccaatacatagactggtggtataagaacggggataaaggcaaacagcattacgccatagaatataccaccggagacgaacaggcaaaatcactcttctacgtggattttgtaatccggatgaagaacggacatatctatctgttcgataccaaaagtataggcagcgatgtgtttgcgtccgacaagcataacgccttgttgcaatacataaaagaaaacacaacggaagaacagccgctctacggtggtgtcattcttcggaaggatgaaaactggttgttctcgccgcttcccataaagaacactaccgacacattgaactggaattgtttctatcctcaaaacgcatgatgattatggcaaaaggaatagaccccaaatttgtacactatggcatccgaaaggatgacttggctatgatagaggcaatctgtgaaaaagaagagattgactttgattggcttagtgaagacatacttaaagcgtatcacgctaagaaagtagatgtgatagaaatgagtgacaacgatacggaagagattatccgtaacgccattcagaaaattcgtcaataaaatttagatgccatgctcatacagaaaataaaaataagcaactataaaacctatctggccctcgaccttgatttgacggtggatgatgacaggccaatcatccttatcggaggatcgaatggtggtggtaaaacgactctatttgaagccatcagtggggctttgtacgggttgaaaatagagagcaaagaacatttcattgaattgctcaatcaaggtgctataaatacagcgaagccggagataagtctgcaaataacatttgtaggcaaagtattaggacaacagcaaaaatacatcttgaaaagaacctacgtgcttaatccacaaggaagacctctcgaaagtgtctctctcaacatgaatggcaatatgtatgtgtatggtaccatgacagccgccaaagacagactacgtgccgaacaggagataaacaaaatcatcaaggctaatcttccccaggaactcagccaatatttcttgtttgatgccatgcaatcgagcgaactactgaaaaagaacgtctttcagcaaaccattcgagataactttgaaaacgtgctcggtttcaaaaaatatctacaactaaaacacgcatcagaaaaactccagcaggaatgggcgcaacaacgtttagaagcagaaaaggaagcaaaggaatacaatgccttatgcggtcaaaaggaacagttgataagtgagttgaatgaatgtcttgccgaacaagacaggctgtacaaatatatgacttcggtagaagaagagtatcaacgtgcaaaagaaggtgcgcaacaaacagccaacctgaacaaacgcatacaagacattgacggcaaaataaaaaacatcactgacgaagctgcaaattatgcagaggtcttgaagtcgtttgtagagaacattgaaatcaatgtgttcctgcccaaactggcatcaaacctgtcgcaggaaatcaacaatcttctccgtgtaaaagagcagctacaaaaacagaataccggtgcctatccgatagaaacgttacgtgatgtaacctccaaaattatagaatatctaaaagaactgtccctatgtagtcatgcggtggatgaagaaaatgtagtagcacatatggtagctttacagaatgctaccaatacagaagatccatatgattatttagacgattcggaagtaactgctcttcgtgaactgcccggcaaaggcggtcataaccagttcgtttctatcgacagaaaaagacaagaattagaggttcaattagcgaacatagataatttgaaatcagaaaagcgcacattggaacagactcgttccggtggaaatagtatgctgatagccaattatgaggaagccaaacataatatagaaaagcaaaaatcgctggaaggcaacttgaaaggcgaaatccaacgtttggagaaacgcattcatcaatacgatgtacagatacagcaagagccggatttgaagtatgacacattgatgaaacttcgtccattcttcgacaaagtggcagatatgcttttgaaaaagaaaaaagcacagatagaaacggaaatgcaagagcaactaaacaagttgcttgtttcctataaaggacatgttgggcgtgttgagttatccgatagtatggaaaaattcaatattaagctataccatacagccggaaatgaaatctcattgaatcaactcaacgctgcatccaagcagatattcattcaagttcttttgaaagtgcttcgtaacttaggcgactataatccaccggtgatgatagacacggtgatgggcgtacttgataatgaaagccgtgatgcacttatggaagagtatttcccgcagttggcagaacagacaattctgttgtgtaccacttcggaaatcagaacggacagcgactatataaagttagagccatttatctcaaagacctataccctacataggaatgtggaagagcaacggacaaccatagatgaaggctattttggtatcacgcttaatcagtagtaacgacatgagtatcatcaatttttcaaatacacgtcaaatggaaggtctgctggatgaaatcagtcctgtcaaagatctgatggagaataaaatcaatctgtctcgtattgtggacagagaaaagcgtgtgagtcttaccctcaataaggtaatgagaatctgtttcattgtgggactgagtattcctgccgagcgaaaagaggaagaatttaaggacattcagctttcaacaagttctgcacgtattgtccccagtttctttaccatgcacgacttgtcaaccctatatgcagctcttttgaaattacgatattcaagtttgaatattgactggacccagaacgccaccctttcacgtatcatagcagcggaaatgcttcgtggtcgtgattatctgataaaagaaaacaatttggatacatatttgtattctatgggcagcaaggtggctatgacaaaagacattccagtgcttaatctacttgtgggtaactatggagacgaggaaatggaagcgaaccttgacatcaacagccgcaacattaccaactctcaaattatcatagctggagctaccggatctggaaaaacaaacttgttagctgtattgatgcagcaatttagagcgttgtcttccgaatcgcaatatcctgtaaattttctgttattcgattataaaggagaatttagcgatatccaaaacaatcattggctctctcactttgatgtggatcgcagttgcatacttgaccccatcgagcatccgcttccattcactccgttcaaagactttacagggcgacctatcaacgaaatcaatctctattcgtctgaaatggcatcagctctctgttccattgacagagtttcggcaagtgccaatatgaataaccggctgagtgaggctattgttgaagcatataagaaaaccagcggatcgcctatcacattcacaatgatgttgaaggaatatcaagctaaaatgaccgaccctgcaaaagacgacagtatttcgtctgtacttaaacagttggtacgagccaatatatttgaggaagaggacaaagctgatttgattggtgattgctatatcatcaagatggatggttatccgaaggacgggcctattgccaaggcaatcgtgtacttcttaatctctaagctgaataacatctatgaacagttagaaaagcaagcaacaaacgacgatgtggttcagatacgccatttctccattatagacgaagctcactatatgcttgactttgacaatcgtcctctgcgtaatctgattgccgtaggtcgaaataagggattaagcatcattcttgccacacaaaatatgagtagtttcaagagcaaaggatttgacttttatgccaatgctcaatatccgctcattatgaagcagcaaactattgatgacaaggttatcaaggatttatttggtgtaagtggcaatgaacttcaagaaattcgcactgccattgctgggcttcaaaagggagagctgataatcaaagaccaaatggcttttgcactgagtatgggcaaaaagtacaagaaaatcaatgtaacgcacttgatataagcaagattagattatgataaaattacctttcgaaataatccaacttttgtggagttgtggaaacaatcgagttgagcatcttaacggatttgctactgaatttagtgaagctacatttgatattgtttccacctcaccctttgttatacgcgcaaataatacagaaatacttcttacgcgagatgaaaatgatcatagtattgatggttatcaatatgtcgtattaacaaacaagatacctcgcaaaagtgaatttcttagaggaaatattttatctatcagatggattaaacaccccaaaatagacaccttacgtcctgaggaaataacagcttcttggagaggtaaattcctttataagaaggaaaatattcaagaatccattttagggcttcgtgctccgcaacttggagctatatatgcgtttatgtcaaaggctcaaattcatcatggcagaaatataatagtcatgccaactgggacaggaaagacagaaaccatgttaagtatcctcattgcgaatcaatgtgccaaagtacttgtaactgttccatctgatgcgttaagagaccaattagcaaataaattttttactttgggcgtacttcacaaatttggaatagttacaagtgattgctcttatccgaatgttggtattgttaaggaaggtatggattataatggttggtacactttaattgaaaaatcaaatgttataatcacgactatgcctcttattacaaattgcgaatcggagattataaatttattaaaggaaaacataagtcatctatttgttgatgaagcacatcactccgaagctaaaacatggagcgagttcatcgactcttttgatgatgaaaaagtcacactatttaccgcaactccattcagaaatgatagccgaagattaaaaggagattttatatataacttttccttaaaagatgcacaatcgcagggatattacaaacctataaaatttattccaataagggagtatgatttaattcaagctgataaacatatagccgaggtagctgttaagcaactccgttctgatatggagaatggatacgaccatattcttatggctagatgcagtacaaaacaaagagccaaggaagtaatggagatatatcagcaatactctgatttaaatccggtgatggtatttagttcaatgccaaaccaaaaatcaattttaaacaacataaaagacaaaaaacataaaattattgtctgcgtaaatatgttgggagaaggatttgatatgcctgaattaaagattgcagcaattcacgacgcaaagcagagtttaccaatcaccttacaattcataggtcgatttacacgtacatcatatgattctaaccttggaaatgcaagttttattacgaacattgcatatcctccaatattggaagagctagaagaactatatgctaaggatgcagattggaacagcttgttgccactcctaaatgatggaacgactgaacaagaaaaagattttaatcaattcatccagtcatttaacaatttggaattatcaaaaattccattccaaagtataaatattccattaagtgcagtcatatatcgaacttcaaacacgtggaatcccaaagcttgggaaaatatactatctcctgagatttatgattatcgtttcggaagtagcaccacagatggagatacattagttgtaatcggaggcagcattgaaaatgttgattggggtaatgtcgaatgtgtacagaatttactttggaatattcttgtcattcatagatattgtacacccaaatataaccacgcctacgtatatagtactttaagtgaaacggatgagatagtaaaggcgatttttggcgaagatgatacctgtaaaatttcagggcactgtgtatttcgtgtcttccacgatataagacgttttgccattgttaattttggaggaagaaaagctcgaatgggtaatgtttcgtttaagtcttactatgggaaagatgttcaagaaggtatttccatgactgagcaaaaacaattaacggcgaataatttgtttggtaacggctatagacgtggagaaagggttagtgtaggttgttctgtaaaggggaaaatatggagtcatacaagaggtaatctacttgaatacacaaaatgggctagaatgattgggaagttagttgaaaatgagaaaatagatcctaattcttttatcaataacactttaagagttcaagcaatttctgaattaccccaaattgcacctattgcaattgattgggacccggaattatacagagattacccagagcatggaatattcttatctcataaccttgttgactatcaattatggtatgctactattgaattagcggattacgagataaagagcacaattacgtttaatatacttattgaggattctaaattcacctatataatcgagtattccgaacaggatagccgcccaatatatcgcgttaaacagatacggggaaataaactaaaaatgagatatggtactcgtctctatgatgatatttgtgattattttaataatgacgatgcagcacctgttatatattttgctgatggttcatgtctttatgctaataatttagtgcgtgtaaattccgatattatcccattccctcaagaaaaattgataggtatagattgggcggatactaaaattgaaaatgaatcacaacatgtagtaccttatgagacggactctattcaatactatttttcaagatacatctcggaaaaattcgatctgatttacgatgatgacggtagcggagaaattgcagatttaataggattcaaaaatgaaaataatgcaatacacatgcatttatttcatctcaaatacgcacatggaggaaaaataagcaatatgatttcaaatttttatgaggtttgcggacaagctcaaaaatgcttaaaatggaacgatagagataaaagtcgccaattatttaatcgtctttttgctcggaagataaaaaaatatcaaggaagagaatgttctagaatactcaaagggactgaagaagaactcgaacaattaagctcacaggtgaactggaaaaaagatctgattatgcacatcaatattgtgcaaccaggattaagctgttcaaatccaagcccagacatacttaatttgttgggttgtgtctcttcatatattaaggatgtatcaaatattgatttgaacgtatattgcaatctataaaaacattgttttaacaactataggatatgaagccaatacgagtatttttattaaaagggaaagaaagcatgattgaccacgtaaagagcatccaaactttaggatgtgcttactggaaaaagtctcgcaataaaaaattggaagttggggatatatgctatttatatcttatcggtaaggggcattatcaagtacgctatcgtcttgaagtcgttgatacaagttgtgttcgtgaagatagttcttgttggattacgccatttcaggctgatgaaaattgttataaactaataccgacttttacaatgtacgaaggcaaggaattgtcattagatacattggaagagatcggtatcaatcgacacacgcaattcaaagagctcaatgaatttcaggaagattttttaaacaagtattttgaatgatatgagtatgcccaatgatacaagaccacaaattatcaacgtgacacgcaagccatcaaaatgtccggtttgtggcagtgaagtcgttgatattgtgtatggcaccggggatatgacggaaatggatttcatgcttgaatatcgcaagaccgccattatgggtggcgacaatatacctctccgtccacctatttggtgctgttcgtgtggatgcaaacgattcagaaaagtaaacgaagacggaacggatgctcctgtaaaggtgaaaatgttgaaaaacatccgcaaggcaccggtgtctaaaatcatctggacatcccaaatgacagaaagagcattagaaaacgattgcatttctgtgatacatcaataccagttagagattaccaccgaacttgacgagcatgagaccttgaaagtctcagcagtgagcggcagtgatgcagaagaccttgcaatggaattggttactaaaggaatgataggacttaaaggtcgtaagtgcgtaaaaatagacacccacgtatgattcatccaaaagatgggacagcgtcccacttattggattgggactgaatataatcaaggactatacaaggattgatataatctcctttatgacgaatggtcagatgcagatgttccccggtgctgcggcctgtactgccggttatgcctaccacttcccctgccttgactattttccctttcgacacagaaacctgcgacaggtgacaatagctgacggtgaagttgccatgttgtaacgtgacatactttccggagactttatcctgtcctaccttcagcactctcccctgcatcatggcaaacaccttggcactccgggcatggaggtcaataccgttgtgaaacttcctttttccggtgaacggatccttgcgatagccatatggtgaattgatcttgacatacgagagcggatagcatacgctgagatagcgtgctacctgctctttcttttttgagtccgcacttgacaaagcaaccttgtcgggtacggacttctcgttttcagaggtgatgctttcgggtgtcgcctctgttccgtttgacgtccgggatggggtttccacagcgactttatagtgattgcccggacaggaaaccgtgttgaactgcgctttcacatggttcccggataataacaaaagaagggctataacgattcgtgtattactcatagatgcaaatgtaggaacagttctccgaccgtgccaaaagatgtcttgatttacctccaaaatataacattaaataagttcagagtatgaatactgcattataatcatacttaaagcataaataaacacaaataattaggctatttagaactacactaattgaagtatgaacaatagtatatacctttgccaaagtataatcaaaatatcatattaaagtatgaaacaagtacgatttgaatttgaagaactgccttacgaaactctctcgcagttcggactcacacaggaaatgattgaagaccttcctatgcgcattttggaagaactcagtcacggcaggcactcgcctgtgcttcccatcaaggtaaacgatgataacggaaacacggtcaccgaccatagccgattcgctttcgtgcgcaaggagaacggagaagccgatgtcgtgttctacccggtgctgaagaaatcctccttggagaagtacagcgaggaacaacagaagcagctccgttccggcaaagtcattcttgccgacacggtaacggctgacgggcgaaagacaaaagccttcgtacagatcgataccgagaccaatcaggtcatgtccgtccccacgcaggtcatcgcccggaaccttcaggtgatggcagaagaactgaaactcagcaatgccgaaatcaaggtgatgcagcagggcgaaccgctgacctttgtgatgcaagacgagcctgtaacagtcggcatcagcctgcacgagaaggacggcatccgcttctgtcagggagacgccaagaaatggaacgagcagaccaaaagagaatgggacaaatacaccttcggctgttacggttgctggatgatggacgatgacggcaatctcgactatattccggaagagcaatacacggaagaactctggaacgaacagaaaaagagtgcccaacgcaatatgggtgctggacttcacaagtaaaacctttcaaacactgtaattatggcacaaaacacctattatcccgaagaagtgctcatcgagaagatggagcgcggagaatacggctggctggattacgtcaaccacttttctgccgaatggcaggaagaactggtggaatactgcaaggcgcactcgctcacgattgacgatacggcagccgagcaattcgtccactacaagagtgaacaattagaagccgccatggaaagcggtgaagcataaacacggactatggcaatacgaaccaacacaaacccgatgagaccggacttgcaacccgaaatgcgtgctcttttgatgcgcaacggtatgcaagcccatgtcgtacctgtgggtgacagctaccagctggtagtacaggggcacgattccccactgttacgataccccatcagcaggcagcagatgcaggccctgaccgactggggaacgaaccatgccaacaagaaagcctacgagaccttcacggacatcgtaaaggaggattttgatatgccccgcaacttcgtccacgcacgcaacgccaacggtcgtgtggcaatgggacttcacggctaccgtatcggcatcggtgagtatggcagggtcggcaggtacggtatgccgccccctttcctcggatggactcccagacagcaggaaggctatcacttgcgcagagtcggcggccggcttttctatgcaggtacacctatggtggcagaacgcccggacgggcgcatgaaacccggcgaattgcaatcgggcggttacggattctactacaaagggcatcggcaaccgcaagagcaggtacagccattccagcaggatgtcttgcaggatttgcaggcagtcatcaccccgatggtaaacaagccaagaagcgaagaaccggcaaagccttacaaggagctgattacctcacccgtctatttctccaatgagaaatggcaagaatgcctttcgtcacacggcatcatcgtggatacggaagccggaacactgaccatccagtcggagaaagtcagtgccgatatggtctatgacctgacagaagaggaattatccgcactgacctccaattccattgaagagcatccggttgaaaaacgcctggagattctgaacaatgtcattcaaaatgactattccgataaggtcacattggaatctctgaacagcaaggagcgcatcagcattgccctgcatcccgaagtggagcaggatctggctatgcggaaccggcaggaacaggacttgctcctgccattggaatccgataacagccttgcaccgcactctaccgaacagaccgtactgcaagaagacgaacatatcatcagagaaccacaagaaggagccttgattgacggacgggacttgtcatacatcaacgaaaacaaaggctggtaccgggaaggagaacacggacgtgaagtggaagtggaagccatcgccgtacaaccagcagaaacagagggcaaatacaagatgaccgccattatcaacggagaacccatcacccatgaaatcagccagaaacagtacgacaagttcctggcagtcgatgactaccaccgcatgaagctcttttccaagatattcaacgaagtggatatgaagacccgtcccgaaatgagcagcggattggggacgaagatattcgccgcacttgccgcaggtgcggttgtgttgtcggatgtcgcccacgggctgcaccatccctgtccggaattttacggagagcgtttcagttccgcacctcgtccttatttcaagccgggagtggactcgccgatggatgtggcagcaaggaactttgaagcgcagatgaacaaggaggtggcagagatgcgcagaggattttaaggaataaaaggaacacggaaatggcaaacggagaactgacatacgatgacttcctgcaacggctagacattcaggatatactgatggacgcaggctatcacctgaacaagcgtgacggcttgcgttatccgtcctatatccgcacggacagcaacggcacacgcatccggggtgacaagttcatcgtcacaccgaacggcaaatgctgtttccagccaccacagcaaaagctctataatatcatatcctttatcaaggcattccctgagaagtttgcggaacaccggaacggcgtctctccagacaggttggtcaaccttgtctgcaacaggctgttgaaccagcccatcaatgacagacctttgcgtatcatccaacccagacaggagaacactccgttcaggctggatgattacgacatccaccgttttgacgtaaacgacagggagactcacaagcgtttttatccctacttcaagaaccgtggcatcgacatcttcacacaacgggcttttgccgaccatttctttctggctaccagacaccgttcagacggtttggcgtatgccaaccttgcctttccgctggtacttcccaaagagccggacaagattgcaggactggaggaacgcggccgtcccaagatggacggtagcggaagttacaaaggcaaagccgagggcagcaacagcagcgagggcttgtggatagccaatttcagcggtgagcctttgcaaaaggcaggcggcgttgcgtggtttgaaagtgcctacgatgcaatggctttctaccagatacacaggaatggttttcgggacaaccctgacctttccaagaaaagcgtgttcgtctccacgggtggcactcccaccgatatgcagattcgcggtatgctttccgtcactccggatataaaccactacttgtgtttcgacaacgacagtgccgggcgtgagttcgtgaagaagttccaagccatagcggaatccatgcacatcaattccgaccgtataaaagtctttcccttgatgccctgttacaaggactggaacgatgccctgcttggcaagacaagcgaggaataccttgacagcatcaaggacgcgattatcccattgggggcagcactcggtacaacggggtgtgcaactgacaaggaagaagaacaccgacaaccaaatatacacagataagagccatgcaacaaccgatatacagagagatttcactacgaccgcaaacggcacagttcttcatcgacgaactgcccttgctgttgctttgtcccgtgggactggtctatggaggaatggagaacgcccctcttgcatctatcgccaccctccttgccgttctcctttccctcattttgatttaccggcttatatacctgaaacgcatacgctatcacatcggtagcgaacagctgactgccgagcatggcgtgttccaacgcagtatcggttacatcgaattgtaccgtgtggtggacttccacgaacagcagagcttattgcagcagattttcgggctaaagactgtcacggtgttgtcaatggacaggaccacgcccaagctggaattgacaggtctgcccaaacgaatcaatatcgtggatattatcagagagcgtgtagagtttaacaaacgacgaaaaggaatctatgagatcaccaatcactaaaataacgatgctcctattcggcatcatcttgtctgtcacggcgaaggcgcagattgtcacgaccaatccgttggaatatgtggcattggcagaaggcaacgaattgattctcggcaaagtaaaagaccagatggacgggcagaagaaaaccgcccttttgcagaataccattgccgcagagttcgagcagatgcgccagtgggagaagaaatacaacagctaccttaaaacggcaagcggtttcgcatcctcgctgaaagcctgtacccacctgtacaatgacggtgtgaggatttttatctcgctatgcaagttgaagaaagccatcagcgacaatccacagggtattgtcgccgcaatgagcatgaacaacctgtatatcgagaccgcaaccgaactggtaacggtattctccctgctccgtgatgccgtggcaaagggaggcaaggagaatatgcttacgggagcggaacggagccagaccctatgggcattgaacgaccaactgtccgcattccaaaagaaactcaacctgctttacctgagcatcaggacttacacgatgactgacgtgtggaacaacgtgacggcaggaatgctggacaggaacaatggtgaagtggcacgaatggcaatgaacaggtggcgcagggcggcaacggtaagataaaaagatggaggaaagagaaaatgagacgggcaatctttatcataatcacactgctgtgcataggcgtgaaagtccacgcgcagatagaccccacccttgccggaatggttctcatctataccgaaaagtccaagaagaccttgaagaaccaagagaaaatcatgctcctgcaaaccaccggacacatctggacgaaagaggaggtggaagccgtcaccgacctgcaacgggagttcaatgattatctggattcattccgttcggtcatcagttacgccgcacagatatacggcttctatcacgagataacccatctcacggaaaacatgggagagttcaccgggcaactcaggaaaagtcctgccaatgccgtggcagtagcactctccacgaaccggaacaagatataccgggaactgatatacaactccatggaaattgtcaatgacatacgcacggtctgcctgtcagacaacaagatgacggagaaacagcggatggaaatcgtgttcggaatccgtcccaagctgcaactgatgaacaaaaagctgcgacggctgaccatggcggtgaaatacacctcgatgggtgacgtgtgggcagaaatcacggaacgggaacaacccaaagccaacaaagcagagatagccaggtctgccatgaaacggtggaaacgaagcggaaaggccggtgctttttaacataacgggaatataaaaacaaaaagatatgggattctggagttcattattaaagacaggcggtaaagccgcaggagcgacaggcaaagccgttggtggagccgtattgcacccatcacagaccttgcgaggggcaggaagcgcattgaagacggcaaccgtaggagccgcggccggatatgtcggctgggagaaactgaccaccgacaagagcgtggtgcgcatcgtgagcgatgccgtcataggagaagacaccaccaacgccatcagcggcacggcgaaagcggctaccgaaacggtaaacaaacttaccggcaaagccgaacagacttttgacagcgtgagccaagcgtcaagttcgctctcttccacgctcgatggagcgtccaattttttaagtggtgtttccaacgggaatgccgggaatatgttaggcaactttttcagcaacctcgcgcatggcaaagtatcgggattaagcatagtcggattgattgctggggcattcctcgtgttcggacgtacaggctggctcggcaagatagccggtatcttcttgaccatgatgatgattggcaacaacacccaacgccagcaagaagcgtccgttaccggcaatcagcgtcaagcccgtccacagcaggaacaggaggaacagacccatagcggaggaatgagaagataagacagtcataacacaataatattctacaaatgaaatacacggaagaaatgattctacagtccccaagcggctattgtatgccctttgaggaagaaaagaataaagaagtaaccttgtcaaaaggctacggggaacagaaagatgccgtcaccagagagacatcctttcatcacggcataaacttccatgccagtcaccgccctttggcggcagtggcaagcggtgtcgtgtcaagtatcggtacggacaaagagcatggtgtatatattgtcatacgctatggcaaatacgaagtgacctatgcgcatcttgctaatatattcatccgtttcggacaaaaggtaaaagcaggtcagacggtagccatcagtggaaatgatcttcacatggaagtggcgtttgacggcgaggaactgaatccgatagagttcctgaccatgctttacggtaatatccaggcactcggcaaatcgggacacagtgcggcacacgagttcactccgtttgacggtgagattaaaaccaggtacgaccgtgacaaggaggaaatcgaggaactgatgctccgcttccttcccgtctatatggaagacctgttccgtggcgagtacatcgtacccgaatatacagaacagtccctgcgtaatgtgttcaccgtgggagcggccaagaactacttctttgagtcgatgccgagcatggcaaaccctttgggcataggcagccgtgccttgcctttggccggcaaggtacagaatctcctgatagcggactttctcaattatctcgctctcaggcacaatgtctatctctctaccatgagcgaggaagtaaaaaaaaacttcaatccgaggcagtagccagcagtggcattatcgacccgttgtcggaactggagatagacgtacagagcttcgatattccgagaatggtgtccgtctatcccgaccgtgccggagtccgatggtggacgaaagcatggttcaataaccgggaggaaggcgaacattccgtagaaatcgaccggatggccgccatccgtttcattcaggaccggatagaaaaggatgaatggctggaagagttcttccccaagcagatggagatataccacaacgccatagaacaaaccaaggaacaactgttgaaccaattgaattattagaacatgggcgaaatcaagcatacagcacgctttgcggagatagaaaggatattcggtgactacttcaatagtcaccttgcccctgtcatgcgagacacgcagaactatctcaaccgcaaacaaacggaagaaatggctgcatattccaccagtacagccggtatcctcggttctatggcggcagccggtaatccgatgatggatccgtaccagacactgagagtgaccggggaatggaactccaagaccacggaggactatctggaaatgtgcagggagaagattgcaaacaataaggagatacaggcagacctcgcattgttggcaaacgagtggcgcacaaccgtggtggatgaaatcggcagggaaagatatgatgaactgtccgggcaattagggtgcgacctcgcttacgcatatacggaataccgtatcggagagttgatgatgggcaagatggtcaaagacaatatgcccaagtcttccgctgaatacatcatgcgcaaggcggcacagaacacacttttcgggctgtcatacacattgaaccagtcaccgcttgccgcagaaatcgagcgatgtggggaagcagcctacaaaccgtccaaactggaaaaagggacaggcaaagtcatcggtgcaagcatcgatgccatatcactcggcggtgcgggaagctgggcgagcttcgccaaatttgtcggggctgacctggcattttcagcactgacttcctccaaggacaaaacaggaaacacagcatccgttgaagattgcatcagcaagggcgtattcggaagtgagaggaatgtctttgacagattccgtaaagaagccaaggaaattcgagccaatgacaatccttatatcatcgccaccaatgaacggctgaccaagaagattcccgtacagagttttgatttcagggactggatgagccataacgcccaagcgaaaatgccgtttgattttattgccggccaaaagataaaagatgagcgatacaaggatattccgatggtcatcgctccggaatacatggaaacttatttgcaggatatggagaagaaagaagaggttaaaggtcaatccgcgcttgcaagcaatccgggacaatcgggaaacacccataccgcacaatccgtccaacaagccaatgaaacggaaacgacggaagaatcaagggaagaaacagccattgaatcaggacagaaccgacaggcaggacagcaaaccgccaatgccaacgaaaacggctggggcgattttttctcaaccttgggattgagtggcatgggagacataagcaaaaatttgggttatgtgcttgccatgttgccggatattctggtgggtatgtttacgggcaggacaaaatcattggatttgggagacaatgtactgcctatcgccagcatcgtcgccggcatattcattaagaatcctattctcaaaatgatgatgatcggactgggcggtgccaatttgttgaacaaggcaggacacgaggcattaggatggaaacggaatgaagataacggtttgaatacgggaaaccgttccgtccgataccgggtctatgcagacgaaccgctgaatccacggatttccggtccgatactgcaagggaacaaccttatcgcaaccatagaccatgtaccctgcaccatccagttgcctgaaaaagtggtgtcagcttacaatgccggggcattgccgcttaatacccttgccaatgccatccttgtcaagagcgaccatacccagcaactgatgtcgcagaattacgaagagaacgacagggaaacgattgtgcgtaccagaggaatacaataaaacagcaacagatatgaaagagaaatcacagtttgagaaaaatgccgccgacaaacaagtggaactgctctccggagcgttaaacggggcggtcagtgcgggcggccactggctcaatgccacaggaaagggctatcccaagttttatccggcaggcgtggcggtcagtccgttcaacgccctgttcatggctctgcactcggacaagaacggatgtaagagcaacctcttcaccttatatagcgaagcaaaggcaagaggcgaatccgtcaaggaacacgaaaaaggagtaccgttcctgttctataattggaacaagtacgtgaacaggaacaatcccaacgaggtcatatcaagggatgactaccaaaaactttctcccgaagagaagaaccgatacaaaggcgtacacaacagggagatacgcacattgttcaatatcgaccagactttgctgccccacgttgacaggaaagcatacgatgacgcattggcaaaatacggcaacagtgtcgagcaaggattcggggaaaaggaattgcgtgagctcaggccgaaattcaatgccttcgtacagtctatttcgagaaatctggcaccggttcgcacggatggcagcggtgtggcgcattatgacagccagaaagacgcgatatatattccacggcaaaaggatttcgcacattacatcgattacgcgcaggagacccttcggcaaatcatagcagccaccggacaccagcaacgccttgcccgtgagggaatggtgatgaaaaacgggattcccccaacagaggatgccgtcaagcaggaacggctgattgccgaaatcgcttcgggtatcaagatgctggaaatgggacttccggcccggttgtcggacgagagtgtcaaactggtggattattggaaccgtgaactgaaagagaacccttgtctgatagatgccatcgagagcgatgtgaacaatgcgctggaagtgatacgcaaagcggaacggggcgaaaaaatcgagtatgccacctatcgtaactaccgccagacagaacagatgcgggagcaaatgcccaagcatttcttcgtggctgacgaaatcaagaagcatcccgacaaggaaaacaagaccattgtcctggtcatcgacaaacaaggcaagagtgccgatgtgatactccctgccggtgcatccttggaggtgaacaacgaaatcaagggaatgagcaaacagcgcatacaaagcgcattggagaaaagcggcattgaaaaagtgcgtttctataatccggacggtgcgttgggctaccgtcccgatgaccgttacttcgccgaaaagcagatagaggtggcgcgtctgaaaaactgggcattggaaacactctccaccatcgatgcgcaccctgcggtgaagcatgctgacaaaccctggtttgagaagatacagatggtacaggatgacaaaaaccgctgggctttattcatcaagccggaaggaaaagccggttacagcgtctatcccgaaaaggatgacctgaaccgtttcttcatcacgctgaaacagtcattggataatatagacaaggtgcgtggagaattggccagaaaatactatgcccttgccgagagcaagccggatctaaaagtggacctgttccacacggcagatgaaagcattgacttgaaccgcatacaacgagtggccgtgttcaagacaaagaacggggcgatactctgcgctcccaccattgacaaccagaaaccgcagccccgaagcgtcacaccacagcaatggcaacggatgtgggtcgccgaggacaggaacagtttcaaacaacatctggcggcaacgcttttcgcggacgtgctgaacaagagccaggcacaggaacagacctcttccgaaaaacaggagtcggaagtggaaacgaaaatcagccgtgacgaggaaatcaagcacgaccagcctaaagaggaagttgaagaagaggaagaggtatcaaaaggaatgcaccgataaacagacaaagcaatgagcaagaataaagaatatgtggagaaatacgccgagtttgcgatggaacagatgcgcaaatacggcatcccggcttcagtgaccttggcacagggcatactggagagcagcaacgggcaaagccatatggccctgaacgagaacaaccattttggtatcaaagccactccggggtggattgcgcaaggtggcaaatacggcatttacaccgatgacaagcccaacgagaagttttgcagctacgacagcgtgggcgattcttacgagcatcattccaaattccttgtagagaacaaacggtacgcggaatgttttgacctgtctcctgacgattacaagggttggacgaaaggacttgccaaggccgggtatgcaagtggcggcaattatgcccaaagtctgcaaaaaatcattgaagcaaacgggctacagcagtatgaccggatggtcatggcagaaatgaaggcaaaaggattggaaacagaaaccgggcaagcggttacgacaaacacctattcattcccggtcgagcgcgaagagttcctgtttgtcacttcaccgttcggaatgcgtaccgaccccatgaatgctgacaagctgcaaatgcacaagggtatagacatccgctgtaagggcgatgcggtgttggctaccgagaataacggcaaagtggtggcagtaaaccaaaatgccaaaaccgccggaggcaagtccgtaaccattgaatacgagagggctgacggaagcaagatacagaacacttatatgcacctgtcctctgttgatgtcaaggtgggtgatatggtgcaagccggacagagactcggtgtttcagggaataccgggacacggactaccggcgaacacctgcatttcggagtggcacagattaccgctgacggacaaaaacgagacattgatcccgcaatctatctggcagacattgcccaaaagggaaacatcaagttgcaagccttgcataatggcaacgacctgttggctaaatacaaaacggaggttactgccactccccaggaaacaaaatcacaaagtcctgaagagtggatgaagaaactgttatcctcggaagacagcggtgtcggactttcaggaacgaatgacccgattatggatatggtggtcaaagccttttcctcgctgatgatgctggcggtagtcattgacaacaagaacgaagaggaacagaaagaagccatttctgaaatggcaggtagccggaaggtggaactgacttcattgttgccccacatgaaaagttgtgcccttgtcatcggagagaacaacaaagccgtattgcaggcagacaacggtatcgtgcaagtctcacgggaactcagtaccgttgaattgagccggctgtccgccaccttgaacaatccgggacttacggaggaaagcaagcgtatgcgagtggcaggaatggtcaatgccattgtgttgtcacaacaggcatcccagaacttcgagcagggaatgtcagagcaacagggccagaacgagcaaatcagaagataatgaaaagcgtgatgatggaaataggattgttgtttgtcggactgtcccttgcaggactgcatacccttgtatgctaccggctgttcggtctggtggtgacactcgtgattgtgggtgtgcaggttgtcattgcgtcagggatagtctggattaaaatccgtgcgcccgattaaagacggaacgtatatgcgggtagttcacatttaataggatattccggtcaaatggtcttggttaaaataaaactacaagcaatatgattaagtgtaacgtaacagtgtgcggaaccatcagcaaggcggctgtagtgcgcaccaacaatgagaacaaggctttcacggcatttgccgtaaattgcgtgattccagcaagaaacggtatcgacaaaacagtggaaatctctgtcgccaaggatggagaggagtacaatcgggctgactataccgtaggcaagagagtggaaatttccggtgtgttgactttcaagaagcgtggagacaacctctatttcaatctgtcggcttcatcggttaaccttaccgtggcttcaaacgaggattccatcaagggcgaaatgctcttccgtggaaagacaggcaagaacatcgaagagaagacagacaagaaaggcaagaatttcttgcagttctccgcattttctgcggaaaaggtcaatgacggcttcgagtacctgtgggtacgcttcttaggctttgaccgtaaacgtgaggagtggctgcaaccgcagaccggcatcgaggccaaaggtgaactggaactgtccgtctataacgacaagctgaacattacctgcaaggtatcggaaatgtcggaatatgtgaaacagccgtataaccctaacaactgacagccatggccggttacaggaaaaacagcaatgacggcccgtccgcggaggacaaggctcttgacctctttgcggaaatgatgattttatgttgacctcaacataagatcatttatgtctgacatagaattatgttgggcattagtctaaacaattaataatcaatcgttctttgacattttgcacaacataattctatctttggaggaattagaggctatctaagaatgtaattaactccttatcctcagaccattttcgtgatggtgtatcggaaacggactgctcacattttttgagaacttctaatttcctttccatgctaatttcggcgtagatgtttgttgtatcaatcgagctatgtcccatccaatttctaaccatatcaatatccgctccagaattaagtagatgagtggcggttgtatggcgtataacgtgaggagatgggcgtttattagcaagagagggatgatttaagattacatcttgtgagtatttctttatcatttcataaatacagaatcggctcataggctgattgtatcggttaaggaaaaggtaatcgtcaggcaacttgttgtctataaattgtttgagtaaatcccagaaatcctcccataaaggacatattctctctttacgccccttgccatgtaatgtcaccattggcattccacgttttgaaggcatcgcaacatccttcactttaacaccaataacttcagacactcgggcgccagtattatacatgaataggataatgacatgatctcgacttcttatcccttgatatttgcatgttttcaatggtgcatcagccaaggcttcgatctcagatttgtccatataggttatcatgcgtttttccgttttctttgaagggataagagtgacatggtgacaccaatctatatgttcaggagatttccacgccagaaactttgcgaaagcctttattgcagctaaacgattgtttcttgaagatacggaaacttttctctcaatttccagataatcaagaaatttcgtaataacgtcagtcgtaatatccgagattttgagattgtctattgcaatacttattaatgtagagacatacgataccaacatacggaatgtatcacgataactcatctgagtgttacgactaaggtttcgagtgacaattaagtactctatgaggaatggtcttagccaatagccaagatattctgtttcagtaattcttctgttcttcattgttcgtgtttttataagcataaaacaatttgtttgcttcctgcaacaaagttggcgtctttgttagatagacggaagtgaaggacacgttaagatgtcccaaatagatagacaacttcggcagtaaatcctgtacgttctttcctgatttataccagttagtaaggacgtcgaccgcaaaagtatggcgaagatcatgtattctaggctgatgacgtcctctatcagggaaataaagacctgcattcttacgaatggtcgcaaatatctgatgtaaagatacaaaattaacaggtttccccttctgattaatgaaaacatatgcatcctctaccattggggacatttgagtacttcgccattgtaatatctcttgcatcaattttgatatttgttcgttgaaagtaaccaagcgagacttgtagaacttactacaatgtatatgcacgtacatattatccatatcaatatcctttatttttaaggataaggtctcacttattctgagtccaagcatatacgtgatcatcaagatatatcgtatacatattggctcattaacaaatgatctatatttgcgatatgtaagcgcacaatcaaacagtctcttcagttcgtcatccgtatatatgtaagcgggataatactctggagctttaggcagaaaaacgggaataggtatgttttgaatgagtcctctagaaaaagcccactcaaaaagttttttcagaatgcagtgctgagaatgccaatatctggtgatgacatttccttttctgtaaaggaaggcattacaatcgctttccgttattgaagttaattctgttgtttctccaatgaacttagcaaataatctcaaagagtaagttgtactctgatccttacgaccaatagacctacgaaacttgataaatgactcaacagtttcttttatactcatagaagctccccccagttaatatttgaaacatctctaagtgaattgagatccacttttgcatatattcttgtcgcttccatacttttgtgacccagtaaatcaccgacatcctttaaggtttgtccttcgtttatcaagaaagttgcatggctatggcgtaaacaatggggacctttgtgcctaacgtccatttcgctggatttcaaatacctatatacgacggaagctatggctgtacaagatataggacgtatcggggctggtgtacaaaagaacaagctatcgcttcctatgtcatttggccttccctgttttaggtaagcgataatagcttctcctacattatgtagaagtggtaacacttgtggtcgacaattcttcgcacgcttaatatagacttgttctttacgccaatcgatgtcgctaatcttcaagtttgccacctcactacaacgtaaaccgtacatagcaagtaacataaaaatagcatagtcgcgcgatgcggatttaccagtttgttctttgactgtttgtaacagtttttgaactttattccacggcaagaaagaagggagattttcttcactatatactttgggagtgattaacgccttatctaggtcggtaatacaccaccccttttcgactgcataacgaagatatacacgaatacaacacaggtactctttcagcgtgttacgttgaaccttgttaatcgtgtagtattcaatgtatttatctatatcttccaatgttaaagggtgttcctggttctccttttctattatcttgtaaaagtaggtgagtatatatctccttcccttaatataggcatgagaatatctcctgtatgccaagtgattaaggtattcatttatgcgtatatctgatattgaaggagatcctgattctggtagcatatgtagctctttaagccacatatttgcaaaatagatgaagaaactataattagacttggtgcctttcttcttgtgagaacctttgtcttccaggttttgccatttttttgctgcatttgagatttcctcattggtaacaatacggaagttctttaaatcaagatactctattagatgaagttgatactgtgcataaagctgaagtgtctgtcttttaaaaccttttgatttgcaatccatcaagaaagacattctctctttataaaagggagcggcaatcagtctgactctgtgccatttgcgctctgcgagataattgatgatgtcgtcttggtaacgagaatctaaaagacctacgtatagtaagaattcaacagccatctcaatgaatttgattcttgaggaagggcaatcatgacgtttccgagaatgataatgatcaggaatgggtgaagaccattgacgtgcagcttcaacgacatcatcaagtgacacaattctcttttcgccatcatgaagatcgaaatattggataaacttgagcgaatacccagcccaccccaatagtgttagccgggacaatccttccttacttttcatagttagaaagtattctcgctcctttaataatggtgcagccaaatgttttttaaggaatgacttgcggataatgatttgttctaacatgctcttataattatatgagtaatactatataatataaacgagcatccaaaattatgttgtacaaaattcgataagaactctaattatcaaataaatatgaaagaaactgacataaacaaatgggcaacattaatgattgagcgtatcgagaccatcagcaaggactggacgaaaccgtggattaccgagggtagcctggggtggccgaagaatctgtccggacgtgagtataatgggatgaacgcgctgatgttgcttcttcattgcgagaacgagggctacaagataccgcgtttctgcacctttgactgcgtgcaacggatgaacaaaccgtccgaaaagcaggcaaaggagggcgtggaactgccgagggtgtcagtgaacaagggcgaaaaatccttccccgtgatgctcactacctttacctgcatccacaaggagaccaaggagaagatcaagtatgacgattttaagaaactctccgatgaagagaagaagatgtacaatgtatatccgaagatgcaggtcttccgggtattcaatgtagcccaaaccaatcttcaggaagcccgtccggaactttggagcaagttggcgaatggggatgccgtaaagttggatgaaagcgagaagatgtcttttgaaccgatggatgtgatgatccgtgataaccgctggatttgcccgataaagccgatgcaccaggacaaggcatacttttccatttccaagaacgagattgtggttcccgaaaaatcccagttcaaggacggcgaatcctattatggtactctttggcatgagatgacccacagtacgggcatcgaggggcaactcgaccgtatcaaaccgtccggtttcggttcggacgaatacgcacgtgaggaactggtggcagaattaggcagcgcattggtggcacagcgttacggcatgagcaaggcattgaaagaagagagctgcgcttatctgaaatcctggctggaccacttgaaggaatcgccccagtttatcaagaccacacttctggatgtaaaaagggctacctcgctcgttacgcagaatgtggataaaatagtgcaggaactggaacagaaaagcaaggtgcagcatgataacggacagcggaatgagatcaaacagtccgtacccgaaggaaaggtgttctactcttccgtagcctatctgcaatccaccgatgacacctcacgactggatgcgcttcgggagaaaggcgattatgagggattactccggcttgccaaggagtattatgacggcaatggaatcaacgagcaatatacctttgtctctcctcgccagaacaagggtgatgatctgctgatagaagacaaggattttgccgtgatctataacaacagcgtgggaggaacttacgaggtgatgctgaaatactctgagcaggaaatccgtgaccatatcacacggtatggtgtccggctggcaagcagtgacataaaagaggttgccaaagacatggcggccgagcagttctctgcgatgacaaggcagcgtactcctgtccttgaaatgccaaacggagatattctccatatcgggtataacagggatgccgacacccttgatgtcggcacggcgaccaatgccgggattgccgtcagtcacagttttccatacgaccacgacaattcgctcgattccaatctccaatccgtcaatgaaaagctgaatgaaatggagcaatatcaaaaagaggaggtggaatacagtggcgggatgcaccgctgagtataaagtctgctatctgttctgttcagccgtagagagtcgccctctctgcggctgaattggtttagtcccactgataagtcctacttacacaaaaaagagagatttttcaccttaattagtcgcaaaatatcggcactattctgaattagtgccgaaaatttgttacctttgcagtcgaagaaaggaataataatcacatgagcaacgagacgacaacattcatacttgactatgctgaagttcatcatgactttagtttaggagatttgtttgcttatctacaagagaagacaggcatcaaaaagtcttctttgtcctggtatctgttcaagctcgtgaatgaaaatgtactggtcagaactgggcggggaacgtatgccaaagtgatgaaacaggtcttttcaccccaaccgatagaggaagtgaaggaggtttacggtttgttgcaatcggattttccgtttgcgaaattctgtgtttatcaaggggacatcatagcccctttgcaacatcacctttcatccaaccgcatcatctacgtggaaacggacagggactcggcagaaaccgttttcaattttctgaaagacaagaaccacaatgtttacctacgaccggacaaaaatatgatataccgatatgtggatatggacagccgtgtcattttcgtgaaaaaccttgtttcggaagctcccttgcaagaagtatccggcgtgcctatgcccacgttggaaaaactgttagtggatatattgagagatacggactttttctacctgcaaggcagtgagagtgaccgtatcatagaaaacgcctttaacctgtacacaatcaacaggaacaggcttttcaggtatgccgacaggcgtaaagtgaagaaagaattatcgtcgattttagaaaacttaaacatacaatgataaagaaagagtgttttacgacagaatggattgaacaggttgcatccgaactgcactacaatgacaagaacctcatagagaaagtaatccgtgccttatccctgcttgaaatgttggttaaagccgggtgtcctctcgtcttcaagggtggcacagcacttatgctcatccttgggaaatctgcccatcgtctgtcaatcgacattgatgtcatctgtcctcccggaaccaatatagaggactatctgaaatcgtttgccgattttggctttatcaatctggaactcgtagagcgcaagcaaagggacgatgcggacatacctaaaagccattccaagtttttctatcagatagcttaccggaacgacacggacgcccaatcctatatcctgctggatgtactgtacgaggacattcattatttccaaacccggcaaatagccattgattgcccgttcatacggctggagggagaaccattaatggtgactgttccgtccgcagaagatattttaggggataaactgacagctttcgctcccaacactaccggaataccttattacaagaacggcagatcttgttcgatggagatagccaagcaactttatgacgtggggcggttgtttgaaaatgtttcaggattgcagattaccgcagaggctttccgcaagattgcggtagtcgaactctcgtaccggtctttgggaacggatatcggacaggtcttcaatgacatccgtcaaacggcactctgtatctccacacggggtaaattcggagaaggtgatttcaacttgatacaagacggaatcatccgtgtaaagtcatttatgtacaaacaacggtatctgatagacaatgctattattgatgcggcacgggcggcttatttagccacgctgattgaaaagggagtcacagaagtggaacgctattcaaacaatccggttgacatcaaggatttggttattcgaccttcgctgaccaacaaactgaacaagttgaaaagcaatctaccggaagccttctattattgggcaaagacgagtgaactgttggaagtatgattttttgcaaacagcacgaaggctattccgcgcataattcacggtcaagatgcacgaaaggctggtatttgtaatcctgctcggtgttatcagtgtcctatggtatatcgttggatattggcggcggaaagccggagaaacggcgtttttagctgcgcaaaagaccgagaaggaggatgaacgtgaccgtttatgccgtttggcggtaagagccggtcatcgggatgcttgtcgtatgttctattgtttacatccggatttattcaaagaacagccaccactcaaaccattcaaattgcacggtacaagagtagtattctatgggcaatattatccatcccggtacaaaccgtttctcaacgatgatcagcaggcgttctgccattccatctatgagtttaaggagggaaaaatacacggcattgagtttttcaaatcttgcatgaacgccttacaaatggatgaccaccattttcatatcatgttcatgccttgtagcgatgagttcaaatatatccagcgattcaagcgtttgaactggtatgtctgtacccattgtccgaatctgacatcaggactatatgatgttgatgtgttcgagccacgtgaaagtttgcatgaagccaaaggttatgagaatcgaatacttgaacggaattaccgaatcacaggagatataaaagggaaagatgttattattgttgacgatgtactgactaccgggcaaagtatgaccgactacaaggaggagatagaacggtgcggtggcaaggtggtagctgccattttctatggcaagactatcactatgccgcatccgctgattgtcaaattggaggtgtggggtgactatattacccgcttttccaaatcaaattagtctctttctttgcggttggattgttgtagctatatagtcagtcaatatcatagcctatcacgtattcatcgttgataagcagatagtaatagccgttgccacaattccggtattctttgctgaagcctgccgacatatcgccattgtcccgtggctcacaccaaagcgttccgtcataaccgcaaaaatcaaagcgacaagtggaaaaactctctttgttcttcattgcctctctgaaacgctgcatagatgccgttccacaatatttttcgatagtggcaagcccgatacatttgccgtcaatgcgtgttcctgtcgtgatatggttctcgtaaagggatttatccaaatccgcatttgcgatgtcacgaagccaggcgtttgtatgtgtggcaagccgggcaagtttctgatatttcagaatgagtttcctgtccgtattcgcctcctgttcttgcgagggatagtatatctgctcgatgcttgaccaatctgtgaatgcataatcttttgtccttttgccgggcgcgataatgccaataacacccctgtcccgattaatgaacaagcgtctgcgttttcctgcaatcctcacatatagagacgaaggattggtttcgttgcgaagatagctctccgcaggatgaatagttgtcgttcccatatccgtatctatttttcaatatttattttaccagtccttaccagtgtaccattgcggtaaagcatgatttctccgggcttgaaacccatttctccgaaggctatgtatctgatataatcccggtacttctcgcctgaaatttttttgccgcacaagttgttgaaaaacataggtattgaaaacccatcctctcctgacaacactgttttgccgttttgtctgatttcgtctaacataccaatttccaattttcatcatcaatcgtaagtttgttcatttcccaatcatactccacttccggtgcattggtataggggaaattgatggtgtagccgatttgtccgtaggaacaatgaagcggtgttacacaaatttccctgccaaaataaaggctcggtgtgcagtattttcgccagttaaagcggtctgcaaggatgttcctgcaaagtcttctgtaatatgatttgtccgataaagtcatagttgtagccattagataaattcaacttcaagtgcttgtagcaactcgtatatcttttcttcgacttcttccatatccgctacaatatccttaatgtgataaggtgcgccattcttgccgtgcccgtcatcgccaatccataaataggcttcataatccgggtcaaagtcctcgtaatatcgcttcataccggcaataagcgtgtcgatgtcttcatcctgcatatcggcattgaaattgaagtcctgcccgtatttggtatagcgttgaaactcaaattgtatgcttgtcttgttttcgtcttcaacgcttatgctccagcctttttcttgggcaatgtccgttactttccgtatctgttcttgggtagtcatactctttgtttttgtggggagacctctccaatctccccactggttgatttaatccgttatctcaaaataatattcctgttcctcgtccgaccattcagcggtcattgcatccgcttccctccacagtttgtcatagagaatggctctttgattgtctcgctcgtgccactgccatatcttgtgattgaggacaaggcaaagttccgtccaatacttgtagttgtctttccattcggacttggctcgcctgtatgtgtcggctatggcattgttcccgaacttgtcggcaatggagaaatcctgccaaaaggtggttatcggctcataaccgttcaactctgttatgttccatcttgggatggcgatttgaagtgcttgcatattcattattgtttatggttttcgtaatactcttcgggcaaatgatagaggtcgttctctgccaaatggtctatggcttccgctgccagacggcacgcccattcgttacgctggtcatatcttcccttgtgccagttctccgccaactgctccataaagtagaacatcagtttggctttctcgtttaccaaatagcggtggtcgtctgccaatgccttgcccacctttcggggtgaagccattttgccgttcacatagtttgagaactcgtccgcaaatcgtttgtcattctccgataattgattgttgtactccatttctaatgaattttgatgttgaacattttttcttttccctttgcttgaagctgttaaacttcgccaccgggatatgttttatgtgcgttaaagactatggggtaagggagataagacaagtaaataaacagggagttaatgaaataccactaatggcacattcgtggaaagctgtcgttaagtccactgaattgttagcgcaggcggtacttggcattctacctccatagtacctttgcacgataaaacaatgccgtgtggcgtgatggccggctctaaggagaatcctccgatgactataatgggagattatcctataaaggttttaggatataaattcggcaatagtttttatttgttgccgacattatacaaaaggatatatatgcagtacattataacggtcaagtgtatgagcagtagcggattttatgcacttactgttcggttaggcacaaagatagctaaaaggaagaaactttgagtttggcactttccccgctattgcttatacaccttgttgtgcattcggctttctttttttactaatttatcagataaagttaatatctttgcagtcaagcaatttcaatttttgaattatgtatttcagcagaccttggacttctatctaagtgataggcagtcctgaataaattccaatcaatcttttaggtcaagacaatcagtctatgctttgtgtgtgctgtcttttttttgatagcattgctttgtcgtagttgctctgtcgggtaatactgcctattcacttctccacgatttgaattcaagtattcacctgtaagaagtaattaacgtgagttcgatgaattataactaaaagagtgacagctgaataagtccgttttcttctgattcaaccctctctactgcaatcatcggcttctttgggaagaatgagtatgccgcaagcccggccataaggttgacagtgaatccggtaacggatcggtgacgcgaatgttcaatctgggctatgttcttaagttcgtcattgatggtctcgatgatggcccttttacggagaagtatcttgtcactaagcgtcattatctgtcccttcatattatttctcagttttgtaataagctgaataccatcgacaaacaactttgagaagatgtccttggatatgtaccctttgtcgccggccaactttccaaacaactgttcaacgaaagtcttgttctttaaagcttaacagttcccccatctcattgcatatcagatgaagtttgaagccatagaaccatcccatcgaacacagcccccgttgagctatacctttaaagaccttgtgcatatgaatacgttggttcctgcatacgcgaagcaatgtgctgtcgacaaagctgatcccggtgcatttccccatacagcatctcttcacaaagagaatgaacgggattacaactgtcctttcaagttcagtaaatcgattgtatgccactgtctttggaaacatgtcagtcatatgttctttaacttcattgatatagaaatgcttgaaacatttatatccgctcaggtggaacaaaatcattatggttatgatctccgcagaggacattctcgagtcgcgatgatacttgcgtttggacttgtctcgcttaggtgcaagaccgtttgccttgatgaatcggtcataaagtttgcaaaagtcatcggccatacagaaaatttcagtaattttgtctcttgagatcatagcaatgtattttgtgaagttgatttgtagtgatttcaaatttacaaaatatattgctattttactaataatcaacaacttaatttcaccgaactgacgttaattaatgacaaaaaagaaattgcccgttcgtttcacgggtcagcactttactattgacaaagtgctaataaaagatgcaataaaacaagcaaatataactcaacaagatacagttttggatattggtgcgggcaaaggttttattactgtccacctgctgaaaaatgtgaacaaagttgttgccattgaaaacgacttggtcttatacaagcatttgtgtaagaggtttaataatgcccaaaacgttcaggttgttgggtgtgattttagaaaatttacagttccgctgttaccttttaaggtagtgtcaaatattccttatggcattacttccgatattttcaggattttgatgtttgataatgtcgaactttttttgggaggttccattgtccttcagtcagagcctgcaaaaaagttggtttcaagtaaggtttataatccatatacggtgttttatcatactttttatgatttggagttcctgtacgagataagtcccggaagttttttgccaccgccaactgtcaagtcagctctgttaaaaattaaaagaaaacagtcgtctattgattttgaacttaaagtcaaatatttagcgtttatttcctgtcttttacagaaacctgatttatctgttagaacagccctaaagtcaattttcagaaaaagtcaggtcaggtcaatttcggaaaagttcggaataaaccttaatgcacaaattgtatgtttgtcgccaagtcaatggaaaaactgttttttggaaatgctggaagttgtccccgaaaaatttcatccgtcataacctaatcctatcttgttaaagttagattttctagttcggagttcgttcttcaagctgatgcacaacagttagcatttaagtcttgtataacagaaatcactacggtaaacagcaagttaccgtagccacgcataaagccacctgctacaatgtgtgtcgtaacaagtggctgacgaaaagaacagaacagattatgcggtcattcgcttacggatttgccgggcgttcttctgaacaagccgaataattcggtcgtggtattccgtagccttattgcaaagccctcttgactgcaataccttgaatgtttcaaggctcaattcaatggtttcaatacgctggttttcaattcggactgaaaataccaacgactgcggtttgagataatattcgcattgtccgacacaatgatgcagggcgttcccctccttgtaataatcatccacgctttccaacacgctgactacaatcagtccgtccgtgaatgacagtccgaagaatttgcttttcaattctttaaaacgctcctcgttctcctttgcctttttcctttgtttctcacgctcctcccgttcttgaataatccttgcccgttcctgatagcggtcgtgttcagctttcaagtctaatggacagacatagtgggcattgtgaatatccttgccacacctttcaagtaagcggatgtaatctgtccaaagagaaatatctgctatatgatagccattgcgtaaaactatcttgtaagtgttccaatacaaatcaaagtacattgaatgttgcaggaagtagttcaaatcggttttcctgcctgccttgaacatcgtttcggctctgctgtctgtcaacaaggcttcgataagccgtgtcggttcgatgtcagccaatgagccttgcaatccgttgcgtcttaactttggagtggcagaataatatggatagaccttgcaatcggcaatccgtctatacacatagttgtctctccgtaactccagacagccgtccaaaacaaaagtgtccgcataatgtccgagtgtgcgtttcaatgccgttatctccgtcttgccgttatcgtccacccaatagcgtgcaatctccatagaataatactccgctttcttgcctttacggaagtttgcgttcataagaaatacacgctgtacctgtaaaccgtcctgtgtggcaagcgtggaataatacgctttgtccttgaatgtcctgcacttggtgtccagtatctccagtcttgcaccgcaatgtgggcaacggcacacctttttgttactctcgttccattgataaccgcaatccatacaggtcgttcctccgttttttgtgcggtatgcgtaatggctgatacattgacgaaatgcccataactcctgcttctttgtctgtggcagtaaccgtccgttggcggttactaccttatgctgtaatctcgttttcgctctcatagtcctaaatcaaataatgttggttgttcgggttcttgtctgaccgctttcggggtcggtttcggtttgctgtttcgctgttggattttacgcagttcctcgttttggtaggctttgagtgcattctccctcgcttcggcttgttcttcgggagatagttctactctatggttgactatcactccgcagttgaccgccttacccacttctatatcatcttcatcatagtaatgtactccaagcgaataaacctcgtcatcggtcataccgcaaccgccctctttacagattgccattgcctggttgagtatgaatgtcacgcaatcgtccaaattcttgttctctttggcatacgacactgcaaagagttcatcggtcttggctctttcgtccagatatgccttaattgcctgcttgaaatgttctgttcctttcataatgtctgttattttgcttgataatagatacttggttcacttgaaacattgtatatgtacgctccgcaccttaccaaaagtgcttggtttccgtagtacatccgtttcattcctttgatactgcctgtgtggtggaaattgggaaatcggctgatattgcaccgctgtccttgttcctttgtcattcgtcttgtcctcatagtgtttagaaatgatagtcaataactccaccgatgtaaagtagttttcccggctcaaactggctgaccgtctgtaaaaacgagtacgattgttcggcatagccattaacgccatactcgtccatatagaactgataaccgaggtcaagtggatttttgagaaatttttcaagctggtacaccgctccaatccacatcatgcagttttcaacggtaacggcttgtgccttttcttggatggctgtaacaaattcctttttccacttgtccgcaccgccattgtatcggattgtgttttctgccacaagagtgaacatcccttttggcaatgccttttctatcagattggcaatatggaatttgcgttcttcctcgtctatctccgaacaatagtcgtaatagtgtccgtccccttgttcaagggtgtcctcgttcaagtagttgtccctgtcaactcttgtttccgtgatttgaaaaatcttgctgtgcataatcagtctgttttaatcgttgaacttttgtctttttcttttcccttattttgaagtctttatcggctttcttgtcgggatctgaattttacgtgcaaccaagagactgtggaaacagagggataagacaagtaaatggctgaggagttgatgaaatacccaatttacgcctgccggaaattgcggaaagctgtcgtcaaatccataaggcattagtggagccgatcggtggaacggtacttggcgttccctcgccgcagtacctttgcagaggaaaatagagctgacaagatgagccggggaaagttcataattctcaataaatataaaagtcaaaggcacactattaaaaaggtaacgacaattatcttccggataaaaaaggatattaggttccatttaggttatacttaaacggactataaaaggcattgccatcaaagaaggaaacgatgataacggactgaagccaaataccagctcagtccgttaatacatcaattttattcttcctctgccattgcttttccgtatgcaataatttcatccattgtaagccattgaggtttttcgtcttccttgaaactattataaagttcagccatcagtttaatttgcagatttacattgcctgcccacaagcgtttgatattccgattgccgtaattaaggtagtattcgcaatcagcttgtaaacgacctaataattggtacctgaataccatatcacgatgtaaaactctgtctattatctttctctcatctgaatttgtttccatatttaccataatcttttttattttgattttttcttctcccttattttgaagcttttatcggctttcttgtcggaatctgaattttacgtgcaaccaagagactgtggaaacagaaggataagacaagtaaatggctgaggagttgatgaaatacccaattaacacttggtggaaattgaggaaagttgtcgtcaagtccaccaagccattagcggaacgacctgcatagcggtacttggcattccctcaccgcagtacctttgcaaaggaaaatagagccagcaagatgagccggaggtgttcattatatgtgacaagtaaaactgctataattggcagatagatagtaggaattgtaaaacaggaaaagcataacaactccggcaaattctttcgatatttgacgaagttgttatatagttcatgcttttttcttattaaaagcataacaaaatcggcaagacgcattgatatttgccaaatttgttataacttcgcaacataattgaagaacaataatgactgccgtaaatcagataatagatattgccagaaaacaggacgggcaattcacacgaaaagacctgctgaatgcggtgcgctctggtatgaaaaacatatcagaaggttctcttgttgtgcttttgaataggatgcttgcagagaacaaaatcatcagagtttcatacgggaaatacaaattaaatgaagatttgaaatatgattttttgtatgagccaagcgaatttatgctttcactcaacagacatataaaagaaaaattccctttcatagattattgtatatggcaaccatctatattcgcttctatgatgttacatatacctgcggtaagaactacattggtagatgttgaaagggtggcaatggaatccgttttcatgtcattacaaaacatggaatctgcaatccctgtttttttgaatccgaaccaagaagatgcggatcgatatattacaaatcgtgatatgattattgttcgtcctcttgtcaaagaggctccaatagatattattgatggctgtcccgttcctacattggagaaaatgcttgttgatgccatatccgacaaggaactacaacatcttcagggtaatgaattatatactatatattcaaacgccttctcggactatgaaatcaaaatgccacggctgttgagatatgcggcacgccgtaacagaaaacaaaaagtcgaacaaattatcaatacaatcaatatatgatacatcccgatagcaggacattatcttggatagaacaagtagccaaagacaacaagataaaagatatagccctcgttgaaaaaacaatccgtgcattctcgttgttggaagcattagcccggtccggttgtccctttttattcaagggaggatcttccttaatgcttcatcttgataccggcaaacgactttcaatcgacattgatataatttgtcctccaggaacaaggattgaagattatctggaaaagtattccgaagaatatggttttggagaggttaaattggtggaacgtatctctcgtaccgatataccaaaacaacatgccaaattcttttaccaggtggcatatccggcaggaggacgtcaggacaagattctgttggatgtattattcgaggaaattcattatgcaaatgtggtggaacttcccattaaaagtcgtttgttaaagacagaaggagatcccgtaatggtaaaattgccaagtaaagaagatctgctcggtgataaattaaccgcgtttgctcctcacacgaccggaatcccatttttcaaaggagaaaagaattgttcaatggaaatctgtaaacagttatttgacgttgcatcgcttttcgacatagttggtgacttatctgttacagcggaaacattcaataagtttgcgatggttgaacttcaatacagaggtgagaatcctgatgcaattcaaaaagttttggatgacatttatgatacagccaaatgtatagtaatgcgcgggcaggacaatcaggaggaatttgacctgattcaagatggaattaaaaaagtgcgtggctttattcatagtgaagtctatactttggaaagtgctattacaaatgcttcaaaggcagcttatcttgccaaacttatcagtaatggcataaatgagataaagcactataatccatccgaagcaaatctattggtcaacgtaacgatacactctccactctcaaccaaattgaataaattaaagaagacgaatgcagaagcgttcttctattggagcgaaatacaaaagttattataacgagatttttataatgcagaagagccgatccatcacggacaggctctcctttcaaaagaattgacatttaactaatcaatttgaacaaaaagaatcttacactttcctatttcatatatagcatgactttggtatgtctgttagcttcagtgggtacataattggaaatacctccttgacagacctttgttatattttcaacagtcactccgcgcctgcgcaactccgtggcaatataatcggctctcgatgcgctcaacttattgtttatatcggcagttccggtggcagcgtcagccgcacctgcaacagtcacggataatccgtatttctttgtcacacgcgccagttcatccagattgaccaactgggatttatcagtcagttgagccgtgccgagttcaaagaagaaatagacaggtgaaccgatgcactcgttgccggaacctataaaggagagataatccgaatggctataaatggaaatgctgtcattattcatatctggagacagcagggaatcggcacctgtgacatagaagccgtttacaacgctaccgtcattattgggtatggcattgacaaattcagacttactgaacaaactgtcattggacaatggagacttaccatcccaatgcctgtttttcaatcttgctcggagcgagttcagtccgctgtaatcgtttctcggatagacattgcccaaactctcccggtcatcaaacatcttgctatatttatcaagcaagccctcaatttccagaatcttcttcaattcgttgatcgttctcatcgccctgtcatgttgcccggtgtatctgcgattactctccgatagctgtgaagcgtaaccaatcagccactcgttctgccggatgtaaggactcgcatcaacggcacgtttccagccggtctttccaatcgtaaacgacaagccggctgacacggagagcatattatctccgaaacgattggatttgccatagccatcaaagtcctggaatgtggaaacattgccaatttccaacaatgcagacagccgtttacagatacggtattgtccctgtattccgtatgaaatggcaaacggattatgtccgttctgcggattgtgcatcagtccaaatcctatgtatggaatgattccccaacgaggattctcaaccttgccataccgatatccaagcacattccacatcaagtcagcatgaaagtgatggtagtcatttgtgaccagttcgcaatctttgaactgccaacctccataaccgattcttgctccgatctgcggagtgaaccacttgccaagcgatgcgaaaatagtaggctttatcctgtcaaataagtcggcacaaccaacaggtttgccaatgaacgcacttgcaccaccttgaagactgacaaaccagttgccgttccaaggcgatgtcacgaatacacccttatggtaagtcggatccaaaggccggagcatctgttcgatatccgtgtacgactccagctgtacagtgtcctttgtcacaggtggtacagccgctttcatgtgcagtgaacagcccatacctgccactgccagaattaaaaatattttctttgtcatattcaacgcattattttgttttgttatccattgcagaaaaacatattctgccgattacctcttttgcttcttgccggaagccggtcgcatcattctgcttgccatcatcatgcaacgccttgcccacgcacggttatcctcgtcatcatcctttccccatttaaggttgcttttacttcctccaccgccatgcgtttcggcaaatgtagtggcatcgttgaccataccaaggaagaggagcgtggcgcagtgcatcacttccgccccttgctcggtcaggctctgcaacaaagaaccgtcaaagacggattgctccgcagctcccatttcagccactcttgccgaatgctctccaaccaatgtttccagcatcacatctttgagcagtacatccacgttggaatggatttcacgactgtatttataggcttcgcctttcagttcctccgtgcgctcgccaatggcatccatgtcccttttaagggcttcaagctgttggtcagccgtccgtagcttatcctgcttgtcttccaatttcgtttggatagaagccagttctttttccaaccgttccctctcggctataatggtagccgtatctccctgatgggattgaagggtgcgttccaatgccgatagttgggattccttttccgctttcgcttttcggaggttatccaccatagaggtcaagcctttcaccctgcgctctgccagacttatttccactttaaggtctgccaatgcttttttgtgttggacaacctgttcctctatattggtacattcttccgaaaggtatcggcggtattcctccgtgcttcgatgtcttgccccagtttcggaaacattacgtccccgttccagttgccatttttcgttcacttgcgagagttcatcgtgtaacattttcattcttgcagaaaactcatatttgtcctttcctgcaaacatctttttgaacgcaaacttaccgtcttggattggcaataaggtaaggtgcatatgcggggtcgtttcatcaagatgtacataacacccgacaatattctcctcaccgaatctttcactcatgaatcggtacatatcctttgcccattcttctatttccggctttcgttgaagcgaagcattggcggtattgttaccggaaccatacacaacagcctggtctccaaaagcaagctgccgcatttgaaacttcgatccgcccagtataaaatccacgaccgtgcgaaatttcggttctgccaaatccgaattgggatcttttatcccacgcccggcaaggttttcagccatgcgttcaggaatagacttgtccttgtttataggtcgcaccttaccgccctttacaatctcgaaattcaaccgttccctttggcggtcataagttcccttgtctatggcgtgtttccagccgctttccgtccagttacgctggtgttcgttgctttgcgcggtggttatgcctttcatcacgttcatgtgcatcacctgccatgatttttcagccatatcatccgtttttatcggacaaccgatttgccccagcttgctgcttgtccggcaaccactcccaccgaccgtagtcgtgtggggtattgagttacccatacttccctatgtttggtcaacgtgcaagcaccgctgcacgcttaaaatggcaagcctacaaatgtagggcatcacggttcatccgtggttatacaatagtttttgacttacaacatcggttgtggagtctataaaagggtggaatcacgctcctggtactttgcccacaacgccctgaacggctgtcggagcgtggcaagcatatccgtttcgctcgaactattgggcgcgccgtcgtttccagcgtccagaatcatcttggcgattatcttggatgcctccaaaagtgaagtccagtcacctcccagttccccgtgaaaaaactccaagaaatcggtcggatcatcgaagcgcgaatttcgtatggcgcgtttcagtccggctacggctacacgttcgacaatctcttgggctaactccgtttctgcacctgcctttattgccggcttgtcgcccgaatgatctttgccggattcatcggcaagccgtttcagtccggcttcatgatactgtccacaaatctctcccatatcttcgtcagacagactgccatttatccattcggacaaagccttgtccaaatcatcggcaagtccggcccctgtatgaccggtataagaggcaggagtttcgccactggagaatggcgcaaaagtcacggtaatgaccacactctttgcgaaccttgtccgacgaatatatcccatctcctccagtttgtcaaggaacgccctgacggtagccctgtgccagtgccattccaccgcaaggtctgaaatggtcacatgacactggtcagcctgcaacacatactcgtggttcttcaaaaagggagcgataaaacctgccgttgctttctccaacaggtcgtagtaggcaccggtctttgtcttccgttcaccgactttctctttgaggtagtcgaaaaacatcatatctgccaatacctgattggcggctctattcttgtctttcatcatttcatttgatttttatttgactatatgtggattctattaacctgccactatccacttattcgtggcaggttcgcgtgatgatgtcagcagtaatgttcggacattgtttttggattttctttcaaatgcttgcgcgtgtcgtcatccttccattcggctaacacacggcaagagggatagaacatggcagccaaaagaagaaaggcgagtgtgaacgccgtggtgtgcagatgtggtacagcgcagatgaccaatgtgatgaaggctgccataacgaacctttttttatcctcgtggagtctgtgcatccacctgtcggcacgtctgaacgagaacagaacggcacaaggtatggtggatatcagaactccccactctccgaagtgtctgccggcatagacatagtgatatagcaggaggaagataagcatacactgcacatagagtttccttgcactctcactacccgccatcctaaggtaaaactttgccataaaaagccggttgctcctgtacaatgacatgggcagtataatgagcaatgccggaaatgacatttcgatgataatccaaatcataatcgtaatcctttgtgtaatcagtattgtttgaataatggcagttcggtcagttccagtttgaccagcccataggtggcaatctctataatggcttccacatccttggcttcaagatatgacgctccttttttaagccgtgcctttaactcgtgattcttttgacgataccttgccaatgccttgtccagctcgtattcggatatgctccatttcgtgccacgctcatagccattgtgcttataagtggaacggagccggagcatacggcacacgcaggaaaccggcctgccccgtctgaacacgacactttgcctgtatccatatccgtcatccacgactatccaactcctgtacatattgataatgtatagcatttgcaggtatatcgtccgtctcatataaattcggcaagcaactcctccttggtcttgcggtacttgaaatgaccggtcttttcgtgaagtttcaagtcaaggcagatgtcagaacacatgaactccagggattcatagatggtcacgtcaatgcggtcaaccttgccggtatcagaaactctcgcgttcatcttgaacatctgtccgaaagccggattggaataggcacaggtgctgctgccgaatgtcgttgcgcttgaaggaatatgatgataaagggttatcagctccatgtcgtcctcgaagatgtccattacttcttccagatcgtatgggtcggcaagcggaaacgaaaggaggacgtaatcgtcatagaaccgcggctgttccattgtggttacatccagcaactgcggaagctggagcggcacaaaggagagaaagtcatcgtaaaaaagttgtagcataactgttgtatttatttgtttctggttcgtcaaatggatgtgagcattatcttgatcagtactccgggcaatacccgccattggtcgttgtccgttccggcagtcttgttgagtttggctatcatctgaggtgtccggtcagcgactgcatgaagtgttgtcctttccatatcggacaggatagccacgctgaaaccatccaaggcaacatacggctgcaacaacatccaaacgtaagcccttgcctgcgcttcggtctttacattgtcttggttgatgtcatcacggcaagccaaagcgttgagtatgattctccggttggttcgcctggctgtatataccaaggcatcccggtaagagagcctgccattctccgcagactggaatatcgacaggcagcatttctccgtgtcgcacgtaatgacagaaaggtcggcatcggcaagttcagtcaaatggtcaaggaacgaacggaacagcctgtcctcttcctttatgaaagcaagcatttcactcttgccgcttattccggatttcaaggtcttggaaaggaacattcggtatttttcaacgacagcattggcactgcctttatatgtcgggacggaatccaatggtttgaaaaacggctccgcttccgctgccgactgcatcagctccgtgtcttgccggtattgggaagtctgctctctgaggagcaacacatccgcaaaagttctcggcttctccagagccagacgggtaaattcaatgcgcaacgaatcgtgcaatccacgaatttcgctttcgtaattggcgtgaatacggtttgccgtgtctttggcgacacaggcagataccgaatctcgaagcgactgccagtcgttgactttttcaatcagacggtctgttggcaggtttgcttcctttcgcacctcggacaggtatgacctgtaagcatcggcagcatttttaacggtctgaaacatactgttgccggtcttttctccgcatgatgccaatgtgacaatggcaaaacatacggcaaaagatttggcatacgaagcacatttctttgagtatgatttcaagtttcctctcttcggtttttgcattgattctactttaaacaagcctttatacatgatatttttattggtttatggcggcaaagttaagtataaaagtttgtatgataatactctaaaataaaactttaatctattttctttttcatacttacgagtataatccgcgaaataaacaagagcgtaacaagtgaaaatacaaagtataataattgaaaaatattttattgagtatgattttaaccgaattaaactttgtatctttgcacttggtatcatttagcattgaacagcactatggcaaaagtaggttacatattcaaggcagccggttatgacggcttcgacactgacaagaagtggatggagcaatacggctgtgtacaagtgatagaggaagagaacggacacgagaaactgcgccctcaatggaaacaactgatggcaagtctggagcgtggggacgagctggttgtctcaaaattcagcaatgccctgcgtggctcccgtgagctggcgacattcatcgagttctgccgggtaaaggtggttcggattgtctccattcacgacaagattgacagccgtggggatttgtttccggaaaccaaagcctccgatgtactggagatgttcggttctttgccggaggaatgtgccatgctgcgcaaggcttcagcccacatcatccatctgaaacagaatatcaaccagccgaccaaagagaaaaacatcagcagggcggaacgtgaaaaaactatcgtggcgatgtacaataacgggcattccattgatgacatctggaaagtgagtggattcaacagccgcagttcggtgttccgcattcttaataaatacggtgtttcactcaatcgaggcaagttcagcgggccgcttgggaaaagaaagaataaagaaaactaattatgggacatagtaaaatttacaataacgactcaaaatatgttatcgccaacgtcatggacgatgtagaaaacgttaatgtgagagaatatttaattgattttcatgcaaaatcaatctatccggcaatagaagcaatggttctaaaagaacagaatttagacacgatatgcaaagatccaatagcaataatgttggcatcaaaaaaaatagctgaaaaagaaattgctagagctacttctctcgaaattcccgaaaatattaaattgctatttcaagaagaactatccaaaaaagaacaaatttctctattaaggggtatttcaataaaaccagaacaactcgctacaatctttttatatgccaatgataaagggtacaaattcagcaattacagatttgaagatacaccaaaaaaatatataggtgcagatttaccatcatttatttatctatgcgatgaaaataccattgaacactatggagagacatcattaacagatggtcaaatgaaagaaacctcaaatccgcaactacgcgcctaatatgatacagaagcgaaaagaatctgcatcgttagtaaaaagggggcacagtgcatcgaatgtcaccataaagacatataaatgccccttaccccaccatgcgacttgaggcaatacgcaaaatcacgactataagttgtcggtgttatccaaagtcattctggaacacattggcataagcattgttgcatgaatagatattcagcacatacttccttgatgtcctgacccatttggctggcacagagatgaacttaaagacaaacgtcttgatgcggcttgttgctttgagtccgaacctcttcacgtcaagcctcgccatgatgaatttatagaagttgcgtatgagtgccataagcagaagaaacaccgtgttttctcccataaaggattttggaagcctgttccagccgaatccgttattcatatcatcgaagatgcgttccttccctccacggaggttatagaattcgacaatctctttctcggaagactcgtagtcatttgtaaggatgcagcggtaggtgtattctccttcccacaggtcgagttcgccgtctatccgcttctgtctttgaatcacaagacggtatgccttccctttccatttctcgatgagaatggaggccagctcaaactcaatgccattgatttcctcagttttccagcctttgagagcaaaggtgtcattgtagatcgaactgcagcggttagcacggatatagaaggacttgcagtgtttagcaatctcttccactatctcttcagaacacgagccgcaatcagctctgaaacggttgataataagcttgttttgttcaaacctttcaaagaacctcttcagcgtgtccttctggtggaaacggacatttgtgttgccgtcgctgttctcaatgccgacaatcaagttgccaataaccgccacgccagggcgataaccaaggaacttcttgtatgtaggcttcgcatcaaacttctcagcctctatgaactggtggtcgaagtcaacgtcatacccctcgccctctttcagctgccctgtggacaataggcaattgaggagcagtgtattcagcttgtctgccgtgttgaagtcgtaggtcttgccagtgtcggatgtgtaggaaatgttatcctgggtcagttcctttatggctctaagaatcgtgtcggcactgcatgtgcgaagtgtcggatgaagcgaaaggtggtacatcagatgagtggtgacatcctcgatgcatgagccgccacaaaaataaacgctcataagcgaacggatgatttcgctgtattgataaccatacagcctgcatctcataccgagggttgagtcgattacagatgagagtctggagtcaaattgctccattattgaaaatattcctccaaaaggagtgagtttctcggatttaattgctacctttgccatgtctgtcgggtttgatacatattttgatttgcaacactaagataggtgaaaaatctgacatggcaaattcctgagcaactttttgttgctcaggtacttaaaaagttatatttgtaatagtgttgcggaattaaggagaaataataactgtttcacaatttgttttagcacgaatccttaacaatgggaaacattggcattgcttttatcaaaccagaagggggttattaggcaatgaaccaggagaatatggaaacaaatcgcacattcactatatatctgactcgtttagcatctcattaaaagatgtgattaagggatttaaagctggaatttgcccacattctaaagttcacataacacttgatgaatcaaaagaataaagtttattgtgtaactattgtaacaatcaaattcgtttttaaataatgaatagcaaaccacacatatggtctattgacaagttattagggaagaatctaatcattccagattatcaacggccatataaatggacggacaaaaacataacagaactcattctcgatactcaaaaaagtattgaagaaagccgtaagtacgctaatttcaaatatcgtataggtacagtaattcttcatagaaatgaaaacaatgagtatgagattgttgacggacagcagcgcatactatcattccttttattgaaattacatttagattctgattttacgtgtaatctgctaaagaacaagtttctaaataaaattacacagaagaatctacatgacaactatacaactatccgagagtggttttcttctgttgatgatacagtgaaggccatttttaacgatgccctaaaaaacattctagaagttgtcgtgattacagtaaatagaatagatgaagcattccaattattcgattctcaaaacacacgtggtcgtgcgctatatccgcatgatttacttaaagcttatcatcttagagagattcacgataagtatgagatgcagaatgccgtagtgaaatgggaatcgaaagatccaaaggctatcagagagttattcgacttgtaccttttcccgatatggaattgggcaaaatgtcgaaagtgtggtaatttcacttctgctgatatagacatctataaaggtattgaagagaagtatggttacacttacgcgcgcagagccaacaaagccatgccttatttcctactcacagagccattcatttcaggaagtgacttttttgaaatggttgatcactatatgaagatgttgcataatataaaagaagaaattgtaacgaatccagcatttcatgatatcgaactgattattacaaacggaaaagatgtggattcagcagaagaattagataaatctttcaaatcgtcatcagttggacttaaccatgcacgaaacctctttttctgcgccttgctttgctattacgaccgttttcacaactttgatgtcatggccgtgaaaaaactatttacttgggctatgatgattagaattgatatgcagcatttaggctttgatactattaatagatatgccataggtatagaagatgacaaatacagcaatgtaaaacccgtaatatccatgattgcttatgcgcgtagacatactgaaatctcaggaatgagacttgacatgagaaatgatgacaaagcagccagtgaaaattggaacaatttatatgcacaacttcgtcaacttaatggatacaattaatatggtagaagaattaaaaatattggatgaagtaacaatattcgatacaaatactcactatgtaattccgcgctatcagcgagcctatgcgtgggaagacaaagagatagcgcaattaattgatgatattaacgatattgattcatccgagaactattacatcggttcacttgttgtttccaaggtacaagataaacctaaaacgtatgaagttgttgatggacagcaacgtcttacaacactttttcttttattgcaataccttgtatcagaaggagcattggaaggagaattaggacagactctctcttttgattgtcgctctaaatctaaatataccctttctaatatccaacaaatactagcagacaaaaagccttctgccgattatgaggaaaatatagatcagtctatccttaatggtataaaagcaatccgtcaaaagtttacgagtgacaaaggattaaacaaggatgaatttgtttcccgtttgcaacatgtgattctctataagatagaagtgcctgaacatacagacttaaaccgttacttcgagataatgaacacccgtggagagcaattagaacagcatgatatccttaaagcccggctcatgagatttctcaacaatagaaaggaacaagaactattttcacggatatggaatgcttgtagcgatatgacaggctatgttcaaatgcacttctcacgaacagaaagagaaaacattttcggtggagagtggaatggctggcctgctaatgaatggagtgaatatagtgactgtttagaaattacagaggattcggagaataatgcaaccataaacgaaatcattaagccaagattcaaagttgacaatgtagatggcatacttgacgatgatactcatatacgctttgaaagcatcattgaattcccgtacttcttgcttcatgcactcagggtttttgtggatttctacgatgtgtcattggaaaaagatttgggcgaattacttgatgacaagaaattgattgctgactttgaaaacgtgattaaatatggaacattagataatgaacctatcaagaacaacaaagaaaattttgccagaatgataattattcatctgttgcaaacacgttatctttttgatagtttcatcataaagagagaatatactggcgaagacaaagagggcgaatggagtcttaaggaattgcacacatctggacaggcatctaaaaagaaagcatattattcaaatacaaagttgaagtatgaaaaagaatgggaaacgacatatgctccacgcaataaagaatgtttaatgattcagtctgcgcttcgagtatcgtatacatccccaaaagtcatgcactggataaccgagcttgttctatggctgtttgagaatgatgaagtagccctattaacaaacgaggctgaagacatagcggcactggcaaccaaggagaatttcttggatggaaaggactacaaacttggtgtaacgactcctcacatcgtgttcaactttctggattacttgttatggaagaataataaaagcaaatacagcgattttgaattcgaattccgtaactctgttgaacactggtatccacaaaatccatctgacggttcttttgactcatgggatgacaaagatacatttggaaatctgtgtatcatttctcgaagtgtcaattcaaagttttcaaacctttcaccagagtcaaagatgaagtcatatggcaaaatggttcaaaaaggaagtttgaaacttcgcattatgggagatattatagaaaaaagttcaaatgacaaatggattaaggttcaatgtcatgaacacggggctgagatgattgacatattagaaacagcatgcagaacattagattgatttactgaatatgagcaagtgtaattacatacaagccgacattatagaaactgagcgattgctcgtccgcaaacttaccaatgatgattttgatactttgcttacaataatgggtaagccggaagtgatgtacgcttgggagcatggcttcagcgaagatgatgtacaagactggatagaaagacagctcgtccgatatgccaaagatggtatcggatattttgccgttctacagaaagaaagcggacaactgataggccaggccggacttatgaaaacaacaatgaacgggaatgaagtcgttgagatcggctacatatttgacaacacatattggcacaacggttacgcgacagaagccgccgaatctctcatagcctatgcttttgacagcttggaattaccggctgtatattgtagtatccgcccggaaaacaaggcttccattcgagtggcaaaacggcttggtatggaatcttgtagtagccatattgttgtttaccgaggtaaagaaatgccccatatcatatacaaattaaaaaagccgaaataaaatgagcaaaaaagaatacatacaagccaataaggaatggctggaagcgaaagccaaagaagagggagtaaagccactcccgaaaggtatctattacaaggtcatcagtaagggaaagaacgatggcaagcaccctgcaccacgcagtatcgtcacagcccactataccgggtggaccataaacggaaagaaatttgacagcagtcggggtggcactccgattgcattccgcctgaacgaactgattgagggttggattatcgcaatgcaacagatgtgtatcggggacaaatgggagatttatatccctgccgaaatgggatatggcaagttctcgcaacccggcatacccggtggctcaacactcatcttcgagatagaacttttcggaattgcataggccaagaacagatgacatcctctcaaaaaaaaatgcttcatcatattgatatttaacaccatacattcgtttatgtcgcgtttttttcgtatctttacaagtagtaatcagaaataaatcagtgatatgggagacgtaatcattacagtattgggattgtgggtgttcatcaaaatcgtgaaagtgatattcggaggctggagcaaaagcgactaccagcgggacaggtaagattcaaccaacagaatgcagcctatgacagtcgttcatgtctggcatagcgagggacttaaaaatcagtatttaattctccctcttgtcgaaaatatcaacccaagcaaagggcgggcagtaaacgagtttcttctgcaagcccgataaataacaaaatgttttgcctaccgggagaaaacgaagtcttggagcggttggcaaatctttttgtatcgggcgatttcggcagagtgtcttgcgaaagaggagcaacgtgcaacattgcgcagccgagcaagtctctcgaagaaaaatagaagaagccgttgacgggatgggtgaaaacttataatgggcaacccatagatgtatgacaagtaaacatacgagcaaaaacaaaagcgaccgaagccgctttgtttgtcggaacgaggcaggagttatttcttgccttttttcgttttcttttccggctccgcaggagtttcttccttgtcgggtgtctggtagaacttgttagcgaccatgacgatgcggttgtgtttcacgccgtccttgtcaatccattcttcgggtttgaagtagccctccactgtaagcagggtacccttggtgatttgggcaagcgaatcggtgttggcgttgttgcgccaggcttccacgttgatgaaagcggacacacgttttgtttcctcgccactcttctcctgacggcttactgccaatgagaagcgtgccacgcttgcatttgcgaactgacggatttctgcgtccttacctacgaatcctgatactgcgaaattgttctcaatctgtttcatgttacaatgctttaagttgttaattaaattatttttacgctgccaatataagtgagtgcagttacagggttgcgacaaggttagcaatcaaatactctttatttttgtcagcgtaagccgtcaaaacctccggccagataaaggaagatttgtgaagcaacaccattgaccaaggctttcagccgtacccggctgcatactaactttgcaacggaaaaatgaggaataacacggccaaaagctgtaacgatatggattggtgaataaacaagtgagcaaggttcgcagacaaaggacagcatccgtccgcagacacaaagtttcaggtacgcttcggctgtaaatcccaaaggagcagagtgatgagacgaggaatccagtatgtcctctcaatgtggatgccgtaatactgaatccgttatgacgctgcacagccaaaggtattttgctatggaagggatagccgaagaacagaatggcacgaagatcgcggaagccagagaatagtcgcgttctaccttaccgacagaaccggagaaatcaaggcaaagaaaacaatggcaagaagtccggtgctcgttgaacaaagcagcccgatcgccattgcgaaatatgaaatgccatatatacaaaaggagacttgactgtcaaagatgaatatataagaggaaaaacggcttgccttgcaagctccaattataaaagttgatgccattggaaatgtatttccaaatggcgtggacacaacaatgtggagcattgccccacattgccattctgccagatgtcggtcagttcaggtatgaccattctgttatctccagttcctcgccacaagggaaatcaatgatagggtcacaaatgaatgtaccacagaaattgaccactacacagccgtttttcagagaggctggttcactccaatcatcgtccgtatgtcggatatgataccacagtttacccttgggcaaggtttcggtggcaatccgcaaatcaataaattcgccctcaatggtcttgccattcgccaaagtcagaagcataggcgatttgctttcttttctgtaatcgtacagcataatctttcttttaatctgttatctcaattatttcatcaatccgaccgcaaaggaatgtccgtaaagcggtcttgtccacagcatagtattcggctatatgtccgtattgcttgacaaagtagcgtttcagtacgtcagagaagtcaaagcggtagcccattagcggaatagcccttttgaaataggtgttgctgttcacgctgttcgtaagccaatttttctgttgtcggctcattggcgtaccctcattgagttgcactctcaattgatagaccttgctgtcttgcagggttgaaagttcgggaatatcccaatccacaaaccttgtcgctattggtgtcatcataaagcaatcctccattagtcatagattagcacttcatcccggtattccaccacctccttgccattggtgagccttaccactatctcgttgccgtagtctccaacgacttctccctctgtatgccccttgtaaggagtcagtaatgtgcataagcacccgataatgtccgtatcttgttcgtcctcgtaatacatagtcagtgagttttttaaggttatcggtatgaccattctccattagagaacacttggaagttcacatactcgttacatagttcgtgtgtcagcactcgaatgtagattttgtctttgtcctccaaaagagaaatcatcttgtttatctctttttcgggatagtcccattttgacgaaaactcgccctcgatactgtcttccgacctgtcaaggtaacagtcgcaaaatgtgtcttccaaaaagttctccaccttatcaaggtctttctcgttctccgtacttgcgtagaagatgttggtcgcataatttgccataatcgcttttgatttgattttttacttttccctctgttggcatcaactactttcgggtttgattaaaattatgtcgctttgcaaggtgtcccggctcttcctgcaaggcttcacagacaaaatacgacctcagttgaaaaccgagtgtggagattttggtttgaaccgataggcttgaccttgcaaggaagaaagacgggatatatacctttgcgacacaattcttatctgccaacccgaaagtgatgtgaagacgagaaaggatagtaggtgtgcaacaggagcactataaacggcaaaacgcatttcaagcaatagcgaataaaaaggaggatttgctgacgaaaagaaaaagcaatcaagagtttagaaattgagaaaatcaagcagtttagtttagaacttgattagatatacaaaaaccaaactaaacctattcaatcattactttactcacgttattggtaactgcatcaaacctaactttcgtccgagggacaagcgagggacaaacaacaatacaacgagggacaaattatgtcccttgcatttcagcatgctttttcgagaatggtcttattgcttttttcttttggtatgcaagactatggcttttggcgtttctgaaataatacagaatctaactctacatccgagggacgaggagaggcaaagcaaaataattgcgagggacaaaccgtgcctcttgcaattcaacacgtttttttgggaagtggttttattgtttttctttcttttggtatgcgaaattttgtcccccgtttgtcccccaaaaatattcttcaaaaatttacatattgatatacaatgctttatacaacacaaatatcgtttgcgtgggcaaataaacattctgcatcggtaagtagctgattatcaacaatattacaatatatcgctaactgtctgaaagccaccgttttggtggcttttttcattttaacactttccatttgaaacttgttacaaccagtttttaagggtaaatttggctcaaatatcgttcctatccctaaattttgcgaccaaatggcaatgggaaaatgacatatatggcaccttatgcaaaaactgcaaaagtgataaatgtgcgcccgttgacatgttggacacctcgtgaaaattcctgcaaatacctgaaaattgctgcaaaggaaatggacgattttaacatgccaaaaagatgaagatattaaagaaatgtttaacatgtggagcagagtttattgcatccaagatgtcaaataaatactgctgtagagagtgcgaacgtgacgcatctcgcaaacgtgaagcaaaacgtaaaaaaagtgtccgggaaagtgaaaaagaagcagctcttgataaagaaagagatgcagttgcttcacgaccatttttgacaccctcagatgttgccttattacttgatatgagtgttagcactgtgtatagatgtttctattccggaatcatcaaggcagtgagaatacgtagaaaaacccttgtccgtcgtgaggatcttgacaaatactttgaggatgcaggaccttatagaaaaagaagttacaagcgtaagcaagaacaagaatactataccctacaagagattatggataagtataaaattggacgtaaagctgtatggggacgttgtgacagattaggcatccctaaagtttacgaagggcgtaatactttctacagtaaaaagcttattgacgcaaatttctctgagcttcttgatgtcatagacattgataactattacacattgagtcaaatcatggaaatgtacaatatgactcagggtgcggctctttgttttgtaaaataccatgcggttcccagggtaaagagaaatggcaggtcttattattctaaggttcatatagattgtataaaacacaagaccgatgaaattgatcctgactggtactcttatgaagaagctatgcaaaagtatggcataactaaagatcaggtaagttatactctaaagacctatagcattaagactgaaaagcgtggaaaattcaccatgatttatcggacggattttgataatatcatgcatcaacgtcttcaaaattcaactccactaataaagtcaaatggtgaagaaaaggttgttttcacggcaaagcaacaggaaaaaatctgtccagcaactcctgaaggatactattctactgatgaggtagcagagatgtttaaaatatcaataaagcatgctggagttataacaagagagaacaacatacctaagatagcactgaaaggatttaatttctatgagaagggatccattgacctgttatacaacaaaaagaataagtatgcagaaatcacagactggataacgccagaggaaatgcgtacaacatttaaaatgacagcagatggtgtacgctcttttattcatagacataagattccagcaaaggttgagtatggtagtacctattattccaaacaacacatagaggaaataaagaatggatattttgttggtagagacaggtattattccgtagaagaagctacaaagaaatataatcttacaaattcacttgtcttctattacgtcaatcactataagctcaccagagtaaagaagcagaaattcatcttttttagaaaagaagaatttgaccggttaatggaaaaacggttctcagaagatgattttatagcaaatattgatatatagtgatatttactttcaatttaccgatgtcagcaatatatcattcgagaattttgagacataaaactataaaaacaaataatatgcagtattgtaaatcagtaactctccgtatgcgagatagacgaaatggtactaaatcattatttctggacttttggccaggctatagaaatcctgaaacaatggaactgattcgtcgtcgttcgcttggcatgtatatatatgccaaccccatttctacacaacagaaaaagtataatgaagctattctggcaaaagctgaagctattcggtgtaaggtattcatagaggtaattaatgagaaatatgacttctttaaccaggaccgtctaaaggaggactttcttgcatacttcaagaatattgtcaacagaaactttgcgaagtgtgatgcagcctataaacatttcagcaggttctgccacaacaaatgtacatttgaaatgcttgataccgtattctgtaacaagtataaagaatatctcttagacacgaaagtatcagcaagaggcaaagtcatggttaacaagcctatatcacgaaatacagcttcagcatattggaatatcttcaaacaagttttaactaaagcctatagggaaagaagacttgtagataacatagcatcccttttggataatattccatgcacaataccagtcaagcaaagcctttcactggaggaagtcagaaaactatacaactcagaatgttcagttccagtagtaagaaaagccgctatattttcctgtttgagtggattacgtataagtgatatactcaatttaaaatgggaaaatatccaaacatatgcagatggcggacattatcttgattttaaatgtgtaaagactcagcgtcagacacaggttccaatcggtgatgatgcttatgaactaattcagccacaaacaacagataaatatattttttcaggatttaatcgtactatgacatatagagtcatgcaagattggattaaggaatgtggaataaaaaaacatattacctttcactgtttcagacatacttacgcatccttacagcttgaacttggaactgatatttacacagtacaacatctccttaatcacaagaatgtaagtaccactcaaatctatgcttcacatgctgatccgaaaacacgagaagcagctgatagaattaggttaacaaatgtaaaaatggaaatgcaagaaaatgaaaacataaatgttaatgcagaaaccaagagaaagaaagagaaaggaaaatcaaaaaagtgacaataaatagtagcgtaaatcattgaaacactgaaacataaataatgttttctagagagattttattagtaacaactagtatcaattagtaagtttatctataaatttgcaataaagtaatacgataaaaaccaattgcaatgacaaaaaagataagagagaatttactgatacttctcatttcaaacattattaccattattctgtttgtgaccgctccatatattatcagggtagtcacaagcactaatgcaacagaaaataataacctaatgttatccccattgccgattttgttatacctcattttattatctttattagtttgtataataactgtcctgtacaggttacatactgagaagcgcataatcattaataatagcatcacttctctacaacctgctacttcagaaaagaataaagcagagattatgcgtgagatttataaaaataaacaggaccatttggaggttaacagatatgaggcaatcaaggagtatacatatactgttttttcaccatacatgacagatgattgtctggaaaccctatgccagaacattaaactttacgagattccagaatcgtgtatcaattctgtattaacaaatggtcagttaaacacactcgacatcagacattatgcctggaatataggagaacggcttggttggagtggacaaaccagagctaccttcatcaagctctgttttcctaaagaacttaatgacgttgaaattgaaagcatcaggcgtacactcagacaaaaagggaaatgtaaaatagaaattgacattcctgataaagatagttacgagtttcattattaaaagaattatatatgcaagaatacgtagaagataatccgataacctttaatgacataccaagagttatgtcagatatacttaaaaaatgtgatctacttgaacagtccatagaaatacttcatgaagagattcgtcaatctaatcaaaagtctccatctgaacacattccaatggatgtaaaagaagcctgtgaatttctcaaaataaaaaaatcgacaatgtactgttatatacagaacggacaaattccagtcaacaagaaaggtaagaaatacacatttttcagggatgatctcatcaaatgggttgagtctggttgtaaaactgaaaagccaatcagtacagcagaaatcaatcaaatactcagcaaaagatcaagtcgaaggaaatagtagagaaatgcgaattcataaatagcccgcattaaggattatctaatgtaggctattttttttgcatatatcacttaaaagcacttagcaaagtgatcagtgataattacaatatagtatataaacaaatgatcatagaaatagaattaaatatttatacacaaaaaaaattaatttatgagtaaaaagaatcaacactctttgctctctctttttgtatttacaatgtaacaatcatttcacaaaccaagagattgagctgtccaaagatgagctttgggacttatttaaagtcagttacaagcattatcaaactgaagtaattaatgatagaaaaatttacaatcgctatgtaaatgacttaatcagttatcatcttcctgttttcacatctgatgaggaagcaatacgaaaacatttccaaaatcttttctgtgtttatgaattactgaccgacagaaaagatcttgttgagaagtacttcactaaatctacattcgaaaagacagacttctctaaaatgcttaatgagtttaaccatgtggaagttatattaaaggactccaatggacttgcatcctttaacagaaagcaaattaaacttatcacagattttgccaatagaaagaatttcttcactacccctgttgacgagaatactattgaaaagttctttaactgtacattaaaaaagactcttatagccacaaacttgcgctatatacttcagctgttatattctctttcccaacaaaaaatgattccatataattgggtatcacttgtagtaagaaataaaatgttagccccacagaaaagtatgataccatcaactcgtggagcaatcagttcacgtcttacagaactaaagaatactactgctacatttcctgaagaagaatatgtgaatatagtaaaacaactgaaagaaatgtattgaagtgaaacaatgtaaagcaattgaaagaaaaatccctgacactctccctgacattttaaactgacaggagacattcaaattgcgaaaataacaataggagtatatttaccccagaatcgattcagcttttggggtactccctattgtataacattaaatcattagaaaatgggaaccagtaacattgaaatcagcatcttaaaaaagagattagaactcttggaaatgaaaattggagaacttaatagtattaatccagaaatactcaatgaacgtcttgcaaagattgaggaaagattatatgtggttaaagaaatgttgaccactgaagaagcttcaaagtatttgggaatatcacaatcccagatatataaactcactatgaatatgcagattccacattttaagcccaaagggaaaaccatctatttcaatagacaagaactcctgagatggatgcgtaagaatcatgtagtgccagcaaaacaaaaaaaatgataaatagaatattacaatgaaaaagaagaaacataataaaaaggaggtttatacagatgctcaactgactgctttactgaaaaagtcagaagttgtcataagttcctcaaaaaatgataataaaaaagaactatgtcatgataagaaggaaaaacagtaatgataaggaatgttcagtggaaagctctcttgaagtcggaatgctaagcaagagtacattcaacgaccaggaattagacaactacctgagacaaggagaaataaaggcatgtgaaaagcctcctgttccaccacagattttatgggttggagattgtaccatagcaacctttggtaatttcagcgcatccaccggtaaagcaaagagcaagaaaacttttaatattacagcaatggttgcagcagcggtaaacaattcaacggttcttaaataccgggccagtcttcctgatggtaaacgcaaaatcctctatttcgatacagaacaaagtaggtttcactgccacaatgtgatagaacgcatctaccgccttgcaggattgagtctgacaaaggaagataaacgcatcaagttctatgggctaagggagttcactcctactctccgtattgccctcatagattatgccctaagaacatttgagggtgtaggattggtcattatcgacggcttacgagatctcatgtatgacattaacaatgccaaagaatcaaccgatgtgatgactatgctcatggcctggacaagcaagtacaatcttcacatccattgcgtgctgcatcttaacaagaatgacaataacaccagaggtcatattggtaccgaacttgaaaacaaggctgaaacagttctgataatcagcaagaacaaacaggattccaacatcagtgaagtcaggcctatgcacatgcgagacaaggagttttcttcatgggcatttcacattgacgacaattctctccccgtcttggatgacggctatcatattacagtagtcaaacccaaagataagcccttgacatctctgccagatgacttacatgccaaagtacttcgcactgtttttgaaggtgagagtccacagaggtatcttgaactggtgaaagcaatcagtcaggcttacgcacaagaaggctacaagcgtggggacaatgcagttaaggatatgcttaaaatcttctgtgagcgcaaactgattaccaaagacaaagacggttatcattatcatcctgcactcctgccgttaaagtaagtttatgagtttaagtttaacagggtatatatatactaaacttatataagcccaattagacattattgatatgccatgaccatagatgaaataaaatcagtcagtattgtacagttccttgaaacggaaggttatcagtatgcctatatccatcgaggtaattactggtatctatctccttttagagcagaatcgtctccatctttcaatgtcagtcctacaaaaaatctttggaatgactttggggccagctcaggaggaaacattataaatcttgttcagaagatgcacccttcatggaataatcatcaagtacttacttatcttgaacaacagattaagaaccataatctcaaatatgctgaagattatgaagcgatgaccaaagaacaacaaagaagaaatgcgtggaatgagagccatatagcagaaaagggtaatgaaagaaaaagtattactttcattgatcgtattagcaagctcagtcatcccaatttgaaaagatatattttacaaagacgtgttgacttcgaggttgctcaggagttctgtaaggaaatacattatcatatcaatgataaacattattatgccatagcctttgaaaatgtagatggtggtatggaaatcagaaacaaatactgtaaacgcagtatcgcaaaaaaaacaatatccgtaataaagcccaacggtaaatcacattcagaatgctgcatatttgaaggtttctttgatatgctcacgtatgtaagtatcagaaaatggatgatggatatacaactttgtgttgaaaacgactgtgattatattgttcttaattcaatcagcaatattaaaactgcatttccatatctccaggtatatgatgtagtacactgttatcttgacaacgatgctgccggtatagctacaacaaaaagaatcaaagacgaatattcagacaaggtaattgatgaatctgtcagatacccaaatttcaaagatctgaacgatgtcatcaatggaatagtaaaggagtaacaaaaataataagtctgttctattagtttaaggaggttccccacaggagagcctccttttttgtgatgtttttattctaatagtatgatttttatcagaatatcatacttctaaacaaatgtatgttaatactgaaatgcaaatcggcatatttttatcgtaataccataaaactcatttcctttgtcatgttacaggagcaaattggttttcaattttatcttctgagtataaaatatttttataataacacattaaaatcagattgagaatgccaggatttgtaatattcgtattggtcctcacctttgcttatgtggtttacttttcagtaatgattacccttgaccttcatagtaagaaagacgaaaagaaaacggatgaagagacctttgatgtcagcagtatggataatgaagaagtgccagtttccgtggaagaacataataatggtcctgaaggtagtgacatgacatacacagagcaagtaacagatgacggccttcgggtagtcattccaacaggcaataagcagaccaacagttccccccctgaagaggaagagtctcagctcacacgacagactactacaagtgtagatctcaataaggaaaacgaagaaaacatggaagagatagaggttgctcctcaatactgtttttatcctgatgagttcatgcaaaatctcaacgacaaacacaacaaaagaaaaattgagaaaaggaatgctatcgataaactgtaaaatcaatcaattgttttttattgcctgtttcggcttcatacttctccagcctcagtcggcatttgctaaatgtggtggtgtggactacagctggggtgctgacgcattgagcaacgcccatgattttgcggtcacaatgatgctctatgtagtatatcttctgtatgctattgcatccatagtagcaattataggagctttacaaatctatatcaaaatgaataccggtgaaggagatgtgaccaaatcaataatgatgctggttggagcttgcctgtttatgattggagcaactatcattttcccagctttctttggctataatattgtataaaaaaaataaacaaccaagcaagtaaggataacgtgtctaatttttaactgtaaaacaacaaaaaatgaagaaaatcaagaatttaaccaaaaggattttcaatgctaaacgtgttggaacattggccatgttgctcttttgcggagtagctgccacttatgctcagaatgctgcaggagactacacagccggaacaaatgcactgacaacagttacggaagaaattgcaaagtatgttccatacgttgtgaagctttgttatgccatagccggtgtcgttgccgttgtcggtgccatcagcgtttacattgcaatgaacaatgaagaacaggatgtcaagaagaaaatcatgatggtcgttggagcatgtatcttccttgtagccgctgcacaggctctgcctttgttcttcggtgtctaaccattaaccaagctgtatggattcgtcatgacaaaggaatcgatcaatcatcaatacgtcagctatcccatgttcaaggggcttcagaaaccccttgaatttatgggattccaaggcaggtatatcacctgggctgcggcaactgtaggtggaggtattctcagttttatcatagtgtattgcatcctcggatttgttgccggactcaccatccttgctgtcactctatgcactggtgctgcacttatctttttcaaacaaaggaaaggattgcacaccaagaaagaggaacatggcgtattcatctatgctaatgcacataagatgtaatcggtcaacatgataaatgagcaagagagttggattttgaatagtgtgtggttaggctcaccctcccgttaggatgagcctaacatagtttatacgacaactctcagattgtgaacgtaactgataagtaatcgaataataaattcaaagaacaatgattctatacgtcatcttaacatttgtggcaatccttattggtatggcaatctcagtcatggctttcggtactggagggaaacgcaagaaaatcttccagaatatctacttctctgtggaagaggtcaacggtatcggggtactttacaccaagaccggtgaatactcagccattctgaagatggaaaatccggtacagaaatattcggctgacattgacagttactacgagttcaatcatctcttcactgcccttgcacagactttaggtgatggatatgccatccacaaacaagatgtatttatccgcaagaagtttcatgacgagagcaatgataaccatgaatttctgtcggaatcatatttcaactatttcacaggtcgttcctataccgactgtcagagctacctgattatcactcaggaaaacaagaagagcaatctcttttcatttgacagcaagaaatggcgtgatttcatggttaagatacgtaaggttaaagaccagttgaaagactccggtgtggatgcccaatttcttgatggcaataaagcccgtgattacgtagaccgctatttctctatgaactttaccgacaaacatttgtcgatgaacaacttcaagatagatgacgagtctattactatgggtgataaaagatgcaaggtatatagtctcgtggatgtggactgcattaacgtcccctctttggtacgtccgtttacgagcattgaggtgaacaatgtttccatgccagtagacatggtatcattgttagacagcataccgtcagctgaggtagtagtgtataatcagatgcttttcatccccaaccagaaaaaagaactttctctgcttgaaaagaagaagaaccgccatgcaagtatgccaaatccaagcaaccagattgccgtggaggacattaaaaatgtacaggatgttatcgcaagagaaaacaaacagttggtatatacccatttcaatcttatcgttggagtacctatcgatacggatattcagcgatgtaccaatcatctggagaatctcttcagcaagttgggaatccacatcagcaaacagtcgtacaatcagttggagctttttgtcaattcattccctggaaattgttattccaccaatcctgaatacgaccgttttctgacccttagtgatgcagctgcatgtcttatgtacaaggaaaggattcagcatagcgaagaaacacctctgaaaatatactataccgacagacagggagtccctgttgcaatagacatcagtggaaaggaaggcaagaacaagattacagataactctaacttcttctgtcttggtccttcgggcagtggtaaaagtttccacatgaacagcgtggtacgtcagatgtgggaacagaataccgatgtggttatggtcgatactggtaattcttacgagggactttgcgagtatgtaggtggcaagtatatcagttacaccgaagagcatcctatcacaatgaacccttttgctatcaaacgtgaagagctgaacatcgagaaaataggtttcttgaagaatctgattatgcttatctggaaaggcacccagggaatagttaccaagacggaagaccgtcttattgagcaggtcatcaaagagtactttgacgagtattttgtgaaccgtcgtattgtgaatctctcgttcaataccttctacgagtacagtattgtccgcataccgcaaatcattgaagaaaataaactttccggcattgacttggcggcctacaactatctgttgaaggacttctacaagggaggcagtcatgaggtgacgctgaatgagaacctggacaccaaactgtttgatgaaaccttcatcgtgtttgaaatcgactccatcaaggatgaccctcttctattccctcttgttacgcttatcatcatggatgtgtttatccagaagatgagaatcaagaagaaccgtaaggtactggttatcgaagaggcatggaaggctatcgcttctccgatgatggccgaatacataaagtatctctacaagacagcccgtaagttctgggcttctgttggtgtggtaacgcaggaaatacaggatattgtaggaagtcctattgtcaaggaagctatcatcaataactcagacgtggtaatgctgctcgaccagagcaaattccgtgagcgatttgatgagattaaggccacactcggtttgacggacgttgattgtaagaaaattttcactatcaaccgcctggagaataaggaaggacgaagtttcttccgtgaggtctttatccgacgtggaagtgtcggggccgtatttggagttgaagagccacgtgaatgctacatgacctacactacagagcgagctgagaaggaagccttgaaactctataaaagagagttgaaatgtgaccatcagcatgccatagaagcctattgcagggattggaatctttcaggaataaccaagtctctagcctttgcacaaaaggtgaaccaggctcaacatgtacttaatctcaaaacaaaaacagaaatgtaagatttgaaaatgaaacactatctgataatacaacttctatttctctgtactatagcacctgctatggcacagtactacagcgtaaattatgatactcgcactgtagcggaaatgtcggcggctttcggtacagaagctgctacagaggcgtattatgctcaacagatagccaagatcagggaacattatcaggcagcagaagtggctgctgctggaatcttcagttccaagttcctcgaccgcagagctctcacaaatctgggactttggaccagtgcaacagagaactactattaccgccgtatatacaacatggtgtctgccaaaattatgcccaaaatatggacagttgccggcatgatgcttaaaagtcctcataatgccctctattggggtagctatctctataagatctgtgatgaggtaaagactttgtgttatcagtttgagtctattgttaccaatagtactttgtcattcaaggacatcgtatttcttgaaatcaaccaggaacttgcagcaattctgaaattgtcagaactgggcaatgtggattggaatgttctgcttgaaagcgtctcaaatattggtacaaacttcacaaagggaaacctaaagcaagacatagacaacctctatgcgatgggcgttagccttgcttcggctggagctggcaatgctgtcagttccattcttgggaacagttcctttaacggaaccattatggacaagacaagcagtgtcattgagatagccgagaatgtgtacgacttatacggcaatctttccaagaatgccggaaataccttgttgcagtttattggtggagaggaaggcatcgccaatctcttctctttgtcgaattacaacacaacggcatggattacagactatgccaatgaagcattcggccagtactacacacaaaggtggtatatatatcgtgtagatgctggttccattaaactttgcgactattatcctcctgaagacaacaactcaattatcaacggtaatcactggtacagaatcagcactacagatgaaaacttttatccatcctccgcacagcgtgaagctgcactccagaactccgagaatcatgcaggatacagtcgttcacagatagccaatctggataaagccaatgatggctatacctatagcatctcatattatatgctcgcatacaagattaattcttcaaagaatggattgtatgcaaaagcatacgcttacgagattcatgctaccaaaagctggaatcgtaaggaagtagtctatgaagacatatttgattcatacactatggacctgaatacatttaaggcgggtatgaacgcacgtctatctgaactaaacgataatgaagagggctatacctattatctgggaagtgacccaaagaaatactaccagactaccaatgcccagaagatttcaggatgtgagacagcaaccatcagcgtaacctgtcatgacggtgccaaattaggagaaggttcaacacaatacaaatgttctgattgtggaagcagtgtaaacaaccataccaagcaatgttctatggcaacaagtgtttccgaaggaagtatcaatacatctgaaatagactccaagataacggagttgaaaggaaatattgtctcagtacaatcagaaataacagcactggaggcagaaaacgcagagctcctgaaaaaaatccagacagcaagcgtcgaggatgctgcaatatacagacagtcctacaatgagaacaaagacagaatatcaagactaaaagctgagatgagctcgtatgagacagaactgtcacagtatgaacaggcaaagcaggaagctatcgacggtgagaatgctgccacggatgactactaccgcataccggctatcatgcaggattgtaaaacagcctataatctgtcgtggaacggttcaggtgcatgggaaggcaatacattcgttcgtactgcctccatgcccaacatcaacggtaccataacctttaaggcaaccatctccatagccaggaaaccaaaatatttcctttggattaagatacaccgtgctatcgtacagatttcatggacgcttactacagaatatagtgacacgcaggttgttgaagtagtcaatctcgatccgtccaaatcggatgcagaaaaagccaacgaggtcaattcaaaattatcagaagtggccagagaatttccggattgcactccttctgtggaatatgccaaaagcagtcctgtggaagtcgatgataccggtgatacctatcatctgctctggtcaagcgacagacttgaaatagcccgtcagattgacacgagactcaccaatatctatgccgaccttgtatcattggaaaagatgatgcactacaaacattccatcatagatatgctgaaaagcgtggtcccatatatcaacgatgacagtggcagaagattgaccctcattgaacaatgtagaaaacgctggttgcgtcaggcagcctccagtgcccactcagatacatataatggtaaatacgatgaagatgaaagcgaccaggaataacataatgccgattattgtttgccttttggtattgttcccgttcactgccaaggctcaatatggttttgatgtagcttccatagaagcctatatcaacgaccataaacaacaacgaagtctgctgcttgttcgatccacactggaagcgagcaataaacttctgcatgagtacagcagtgatgccaatatcggcttcagggacatcaataaggaacttgacagatacacgcgtgcgtttgacgttattgacattctgtatcagtctcttaggactagtctcaatatctacaacacctacgaaaacatcagtgaccgtatgggtgattataaaaacatgcttgaagacttcagaaggaagtgtctggacagaggaaacattgtaagcactgataccttgataatcacagtcaatgtcggtgctttggcaaagattgccgaagaaggagacaatctgtatcgttcggtcagtgatttaatcctgtatgcaaccggtgcggcagcctgttcaactgcggatctctatctcattctaatgaacataaacaactcactcgacaatatcaggacgcatctgaacagggcatactttgaaacctggagatacattcaggtacgcattggatattggaaaagacaggtttatcgtgcaaagaccaaggaagagattattaatgatgcttttggccggtggaaagttgcgggctatttaggctattaaataacaatttaaaactcaacagatatggtacattctatcagttatcggacaacattatgtttatgtgcaatgctgctttgtttcaaagcagttgcccaatcttatgtgacatacaatcacgatgcaacaaaaatgaatcagattacagttcaggaaataggtgttggcggactaacccctgctttctactacaccctctttcataacagctaccaaaaatcggcagcaagtaaaaacaagctgagctttagaacactggctggtgtagaatcataccaacaggtagatttagctgacagcattcaagcgtcactgactcagcgggctgaaattgaagctctcaatattgccgatagacagattgacattgcctggcttgcagaaggcagcaaagtgaataaaaagctatcagactttgaaaagaatatcaaccgcatcatcagtactggaggtacggcaaatgataaaacacgatggaacgaatactacaagatttttcagacagccattaaagcaacccaggatgcttatatgcccaatgcccaaaggaaaaggcaataccttgcgatatacgctgatatagagcatcagaacgaaattcttatagcgtatctgattcaattaagcaacaggagcaaaactgcttccctattgtctgcccgcttgaatagacggactgatgttgcttctcatgcaaccgaagcatttagccgttggcgagacgccgggcaactaaattcaggagggcacaattaacagagaattataacataaaaaggaaactaaaatcatggcagattcaaatatactctcagatttcggtatcaatattcttgaagaagagattgatgacgtgattttccagacaaacgagttccttacagatgccacattcacaggttcacaaggaccgttctggtggattctccaaatgtgcatggctctcgctgctctgttctctattgtagtggctggaaatatagcttataagatgatggtgaagcacgagcctctggacgtgatgaaactgttccggccattggcaatatccgttattctgtgttggtggtatccacctgcagatacgggaataaccaacagtggaagtagctggtgtttccttgactttctttcttacattcctaactgtatcggttcatatactcatgacctttatcaggcagaatctttacagatagaagataagtttgaggaagttcaggaactcatttatgtcagggacactctctatacatccttgcaagctcaggctgacgtagcacattcaggaacgtccgatccgaatcttattgagtccacgatggaacagactggtgttgaagaagtgaccaacatggaaaaggacgcatccagactatggtttacttcactcacagctggtgcagtggtcggactagataaaatcattatgctcatcgctctgatagtttatcgcatcggttggtgggcgactatctactgccagcaaatcctgttgggaatgctgaccatcttcggaccaatacagtgggcattcagtcttctgcccaaatgggaaggcgcctgggcaaagtggctcatacgttatctgaccgtacacttctacggagctatgctgtacttcgtaggattctatgtactgctcctatttgacattgtcttatgcatacaggtggagaatctgactgccattaccgaaagtgaacagactatggctgcctatctgcagaactcgttcttctcagccggctatctcatggccgcaagtattgtggcattgaaatgtctcaaccttgtacctgatttggccgcatggatgataccggaaggtgatacagcattctcaactcgaaactttggtgaaggagtcgcacaacaagccaaagtatcaacccaaggcatgattagcaaagtaatgtaagcaataaatcaatatggaatattatggtaattaagaatcttgaaaacaaaatcaaactggtgctgattatatgttcccttttccttgcaggctgcatcatcatctgcatctccagcatttggacagctaggacaatggtctcggatgcccataagaaagtctatgttttggacggcaatgtgcctattcttgttcatcggagcacaatggacgaaacgcttgacgtagaagctaagtctcacatcgagatgttccatcatctgtttttcactctggctccagatgacaaatatatcaagtacacaatggataaagcgatgtatttagtggacgagacaggtcttgcccagtataatacattgaaagaaaaaggattctactcgaatattatgggtacgagtgctgtgttcagcatattctgcgacagtataaaattcgataaggaaaagatggagttcatgtattatggcaaacagcgtatagaacgacggacaagcattcttaccagagaactggtcactacaggtcagctcaaacgtgtaccgaggactgacaataaccctcacggattgctcatcacaaactggaggacacttatgaataaggatattgaacaaaagaacaaaatgaactactaatatgggatggaaaaaattatttgtcggagagaagatgccagataagaatgatccgaaatataagcaaagatacgaaagtgaagtcaatgccggtcgcaagttcgcacgtatgatgaaacttgatgtgcttgccggaatggttcagaactttgccaacaaccacaggaaactgtttcttgtcattgttttcggacttattatactctgtctatgtctgaatatctacagaatggcatttgtgtttaacaggcagcaatccgtccaaagtgccacagaaaggcaggagttgatatggcgtaaacattataacaagggcaatgaaacatccaaccgtgttcacgaagtaccttctaccgcctatgacgaatctaataataacaacgtaaacataaagaacgatggacgcactgaagaaaattaactggaagcagccaaagtatatgattccaataatcatctactttcccctgttgtttgtcggttactttgtcatagatctgtttcatacggagaaggcagagactcctaacggactcactacgactgattatctgaacccagaattgcctgatgccaacatgaaaggcgatggaattggcaataagtatgacaatatgcttaaatcatatgggaaaatagatgactatactgctttaggaaacattgaccgtaatgaagaagacaacaaagaagagtatgattcaaaatattcagaagaagagcttaaacaattggaatctcagaaacaggaagccgagaaactcgctgagatgcaaagacaactacaggagagcgcacagaaaggtcaggaagtcgcacaaggcgacggtacttctgaagaagaccgcttagccctcagtaaacaacgtgagcaagaagccatggaggagctgaaccgggctattgcccaagccagattacaaggtctgcaagctacaaatttgccgactgatacggatacacttacaaagaggaatgaaaagaatctggaagtgtctgatgaaaaagaaaataacgatgaacccctggaagtggtcaagaaagtcagagtaacgtccgactatttcaatactatctgtgagaatgaaaaagagcagaagttaattaaagccatcatagatgaaaacatcaaggcagttgacggctcaagagtccgtctccgattaatagatgatgtgaaaatcaatgaagttgttgttcccaaaggatcatacctttatgcaactatgagcggttttggctcacagcgtgttaaaggcaatgttacaagcatcatggtagatggtgagattatcaaagtaaaccttgccctctatgatacagacggattagaaggactgtatgttccaagcagccagttccgtgaaacgacaaaagacgtgggtagcggtgcgctaagcaatacatctacactcaccaatacaaccacatctggaaacagtctggcatcatggggagcgcaagctatttccaatgcagtccagaaaagcagtaatgccgtcagcaaggcaatcaaaaaaaataaagccaagctcaaatatggcacttttgtttacctaattaattctcattcaaacaacaaagaaaaataatttaagcacgtagatattatgaaactgaagacttttaaaagaatcggcgcattggcggtatgtgttttggcacccctcccctctatggctcagcagacgtatcaggaaatcgaacagctcaccgttaatgagaatgtgacaactgttatcacagccacagaaccagtacgctttgtcgacatctccactgatgccgttgttggagaccagcccatcaacaataccatccgtcttaaacctaaagaaggagctgacatacatgccgatggagatattcttgccattgtgacgattgtaacagaacgctatcgtacacaatatgcgctcatctataccacacgtatgcaggaggcagtgtctgacaaacaaatccagccggaagagaaaattccataccacaacccggcagtctcaatgagtacagaagagatgaccagatatgccagaacgatatggaactcccctgcgagaatacgtaatgtgagtaccagacagcatcgtatgactatgcggttgaataacatctactcagttggtgaatatttctttttggatttcagcatagagaaccgcaccaacatacggtttgacatcgatgagttgcgcatcaagctaaacgacaagaaaatatccaaggcaaccaacgcacagatgatagagctgactccggtcttggcactcgaaaaggcccaaagtttcaagcatggatacagaaatgtcatagttctgaagaagatgaccttccccaatgacaaagtcctgactattgaactttctgagaaacaaatcagtggccgaaccatcagccttgacatcgattatgaagatgtgctgtatgcggactctttcaactcatgtctaatgatggaggaataagccatgaagaaaatcatcttatcattgataatggtactcagttgtaccatttcttcatttgcacaaagtcacagtgaccgtttatccttgggagttggtgcactttatgaacgtgggctggatgctaccatcgcatgggaacatgaaacacgtcaccataacgcttgggagtatttcatcaacggctatattaaatgggacgaatgtgcttcatgtggtcatatctgtcctgattcattttggaacaactatcggacatggggaattggagtcgcatacaaaccttgtttagtcagaggacgtaaccattacgggaatctgcgcataggagcttctggaggcagtgacacagataaattcattgccggtattcatgccggttacgagcataatttatcactccgtcatggctggggactgtatattcaggccaaatgcgaccttatcgtccctgaccgtaaggatttgttccgaactggtatagtaataggatttaaaatacccacatcaaaaagataaagaagatgaagatatttcacaccatttgtgccgctttcatggcggcaaccatagcatcatgtgatgcacatcaggactttccggatacctcaatgaagattggagacatcctgtgtaccgatggaaaagtcgtcagatatgaaaaaatgaaagcacaggaaaagacacccatagccgtggttttctatgtcaatcaaaaagaggatattgaaggtactggatatgcagtctatctgaaagatatagagccttgcgcctactctgatagtattggaataaagcatgatacttccgcagacctggcagccttcgatgggaacagcaatacccatgccatgtattctacctatacttcgcctgcagccgaagctgtttttgacatgtggcaatatggacagagcgcctacatcccttccgttgctcagttatacctgttgtatgaagtaagaaataagattaatgaatatatccgtaaatgtggtggagatgagatacaggacaatcctgatgaatgctggtactggacatcaacagaagtaaaggagcaggaaaccgataaagcatggttgttctcacttgcctctggagccattcaggaaacgccgaaaaaacaagcacataaaatcagaccaatcatcacattatacaattgattaaagaaccgcttgaatggaagaaactaaagaactacagaccacgtataaaatattccgctacttgatttatctgtcactgatagtggaatttttcgaatatgccattaatcctgaactactggattattggggtggcattctgtgcgatattcatggccgtataaaacggtggtatatttatcaggacggcaaccttatatggagtaaaatagccacctttatacttatctgcatcacctgtataggaacacgtaataagaagcatctggaatttgatgctcgtcatcaggtattctatccgctttttggtggactcgttataataatattgtctatttggctttacggccagagtatgggtatgaaattctatacgatcagtttgaactactggttgtatatggttgcgtcaatcattggcaccatatgtatacatgtagcccttgacaatatatccaagttcttaaaggaagggcttcttaaagaccgttttaatttcgagaatgagtcttttgaacaatgccaggagttgcaggaaaacaagtacagtgtcaacatccctatgcgctattattataagggaaaattccgtaaaggatgggtgaacattgtcaatcccttccgtggcacgtgggttgtcggtacaccgggttcaggtaagactttctccattatcgaaccatttatccgtcagcacagcgcaaagggctttgccatggtcgtgtacgattataaatttccgacacttgcccagaaattatactatcattataagattaatcagaaggccgggaaagttcctaaggactgtaagttcaatatcatcaactttgtagatgtagagtattccagacgtgtcaatcctatccaacagaagtacatcggaaaccttgctgctgccagcgaaactgctgaaactctgttggaatcactgcagaaaggtaagaaagaaggcggtggcggtagcgaccagttcttccagacttctgctgtgaacttcctcgctgcctgcatctacttctttgtcaactataaaaaagtgccttacgacaaagacggccatgccctcgttgcagagatgaccacagaaccgaagacgtaccgacccaagcctacaggccgagtatttgaccagacaggcaaggaagtggaacctgaatattggttgggaaaatacagcgacatgcctcatatcctatcctttctgaatcaagactatcagaccatctttgaggtattggagacagaccctgaagtagctcccctattggggccgttccaaacagccatgaagaacaaggcgatggaacagttggaaggtatgattggtacgctgcgtgtctatacatcccgcctggccaccaaggagtcctattggatatttcataaggatggagatgactttgacttgaaggtgtctgatccgaagaatccgagctatctgttaatagccaatgacccggagatggaaagcattatcggtgcattgaatgcactgattctgaaccgtctcgtaacccgtgtgaataccggtcaaggtaagaatattcctgtgagcatcatagtggatgagttgcctactctctattttcacaagatagaccgactgattggtaccgcccgaagtaacaaagtgagtgtcacactgggctttcaggaactgccacagctcgaatccgattatgggaaagtgggtatgcagaaagttatcacaacagtgggcaacgtagtcagtggctcagcaagagcaaaagagactttagagtggctttctaacgacatcttcggtaagattgtccagctaaaaaaaggtgtaaccattgaccgtgacaagacctccatcaatctcaatgagaatatggacagccttgttccggcaagtaaaatttcggatatgcccaccggatggatttgtggccagtctgctcgtgattttatcaagaccaagacaggacgtggtgatagcatgaacattcaggagtctgccgagttccagacctccaagttctattgcaagactgatttcgacatgaagaagattgccgaagaggaagcaaactacaagaattatcagattccgaaattctacaccttcccttcaaaggatgccaaggaacgtattctataccagaacttcgtgagtgtcaatcttgatgtcaagaacatgattgacgagataacaaaatttaaagtaaaatgagtttcaggataatagcagcttttgtcatattcttatttggtatgagagttaacgcccagacggtaatgccgtctgagccactctctaaagccctaactatttttgagcttccaccttttgaaagggccgtctgttgtatcaagtactatgagggactacatcgaaaaaaagattatccttacgttggatatggacatcgactgcgacccggagaaaggtattcatccgagatgactgccacagaatcagagtcacttctccgtaaagaccttaaagagctctgttccttgtttcgtccctacggtaaagactcactattgctcgcagcattagcttataatattggagctttcaagcttttaggattaaaaggtaaatacccaaagagtataatcctgaaaaaactcgattcaggagacagaaatataaaaaatgactatgtgaagtattgccactggcgtggcaaaaagattgcttccatcgagcaacgacgatatgctgaatttatgctgttattcgattcatgaatatgtaattccactggtaaaatgcctcggtgtcttaccagtggaatttatatttagtacacatgacagtcaggtttatttcccattactatattcatgtacaacagccttctgagcctcattaagggcatcccattgtgttgccccaggagttaacaccatatccataattgcctttctggtttcctttggtaaagacttccattgttctttttccttatcagagaatgcaccaggtactaacatatttaagacatctaaagcagtaaactcattattagtagcctctgacaacgacttcttcacatctcttttagttgcacaagtatcaacggataaagccaaaccggtagtgtcatttgatactgaaattccacaaaatccaaacatcttagcaagcaagtctttggagatagtaaattgagcatttccccttttgcttttgtttgccctgcttttggatagagaattgtgaaccatcgtctgcgtcttaggcaaagccatacgaacctgtgactgagcacaaattcgagggatggccacaaacattgccaataccactataattaaatatctactcatatttattccttaatataatctacaaatttacaaagaattagcttaaatgaattacataagtcaatataaatgcagtt
